(19) United States
(12) Patent Application Publication
(10) Pub. No.: US 2020/0362039 A1
(43) Pub. Date: Nov. 19, 2020

(54) CROSS-SPECIES-SPECIFIC PSCAXCD3, CD19XCD3, C-METXCD3, ENDOSIALINXCD3, EPCAMXCD3, IGF-1RXCD3 OR FAPALPHAXCD3 BISPECIFIC SINGLE CHAIN ANTIBODY

(71) Applicant: AMGEN RESEARCH (MUNICH) GMBH, Munich (DE)

(72) Inventors: Peter Kufer, Munich (DE); Tobias Raum, Munich (DE); Roman Kischel, Munich (DE); Susanne Mangold, Munich (DE); Ralf Lutterbüse, Munich (DE); Patrick Hoffmann, Munich (DE); Doris Rau, Munich (DE); Matthias Klinger, Munich (DE); Claudia Blümel, Munich (DE)

(21) Appl. No.: 16/728,609

(22) Filed: Dec. 27, 2019

Related U.S. Application Data
(63) Continuation of application No. 13/122,242, filed on Jul. 14, 2011, now abandoned.
(60) Provisional application No. 61/101,846, filed on Oct. 1, 2008.
(60) Provisional application No. 61/101,933, filed on Oct. 1, 2008.
(60) Provisional application No. 61/101,850, filed on Oct. 1, 2008.
(60) Provisional application No. 61/101,921, filed on Oct. 1, 2008.
(60) Provisional application No. 61/101,927, filed on Oct. 1, 2008.
(60) Provisional application No. 61/101,844, filed on Oct. 1, 2008.
(60) Provisional application No. 61/101,853, filed on Oct. 1, 2008.

(51) Int. Cl. C07K 16/28; C07K 16/30; C07K 16/22; C07K 16/40

(52) U.S. Cl. CPC C07K 16/2809; C07K 16/30; C07K 16/2863; C07K 16/22; A61K 2039/505; C07K 16/40; C07K 16/3069; C07K 16/2851; C07K 16/2803

(57) ABSTRACT

The present invention relates to a bispecific single chain antibody molecule comprising a first binding domain capable of binding to an epitope of human and non-chimpanzee primate CD3 epsilon chain, wherein the epitope is part of an amino acid sequence comprised in the group consisting of SEQ ID NOs. 2, 4, 6, and 8, and a second binding domain capable of binding to an antigen selected from the group consisting of Prostate Stem Cell Antigen (PSCA), B-Lymphocyte antigen CD19 (CD19), hepatocyte growth factor receptor (C-MET), Endosialin, the EGF-like domain 1 of EpCAM, encoded by exon 2, Fibroblast activation protein alpha (FAP alpha) and Insulin-like growth factor I receptor (IGF-IR or IGF-1R). The invention also provides nucleic acids encoding said bispecific single chain antibody molecule as well as vectors and host cells and a process for its production. The invention further relates to pharmaceutical compositions comprising said bispecific single chain antibody molecule and medical uses of said bispecific single chain antibody molecule.

[0001] The present invention relates to a bispecific single chain antibody molecule comprising a first binding domain capable of binding to an epitope of human and non-chimpanzee primate CD3 epsilon chain, wherein the epitope is part of an amino acid sequence comprised in the group consisting of SEQ ID NOs. 2, 4, 6, and 8, and a second binding domain capable of binding to an antigen selected from the group consisting of Prostate Stem Cell Antigen (PSCA), B-Lymphocyte antigen CD19 (CD19), hepatocyte growth factor receptor (C-MET), Endosialin, the EGF-like domain 1 of EpCAM, encoded by exon 2, Fibroblast activation protein alpha (FAP alpha) and Insulin-like growth factor I receptor (IGF-IR or IGF-1R). The invention also provides nucleic acids encoding said bispecific single chain antibody molecule as well as vectors and host cells and a process for its production. The invention further relates to pharmaceutical compositions comprising said bispecific single chain antibody molecule and medical uses of said bispecific single chain antibody molecule.

[0002] T cell recognition is mediated by clonotypically distributed alpha beta and gamma delta T cell receptors (TcR) that interact with the peptide-loaded molecules of the peptide MHC (pMHC) (Davis & Bjorkman, Nature 334 (1988), 395-402). The antigen-specific chains of the TcR do not possess signalling domains but instead are coupled to the conserved multisubunit signalling apparatus CD3 (Call, Cell 111 (2002), 967-979, Alarcon, Immunol. Rev. 191 (2003), 38-46, Malissen Immunol. Rev. 191 (2003), 7-27). The mechanism by which TcR ligation is directly communicated to the signalling apparatus remains a fundamental question in T cell biology (Alarcon, loc. cit.; Davis, Cell 110 (2002), 285-287). It seems clear that sustained T cell responses involve coreceptor engagement, TcR oligomerization, and a higher order arrangement of TcR-pMHC complexes in the immunological synapse (Davis & van der Merwe, Curr. Biol. 11 (2001), R289-R291, Davis, Nat. Immunol. 4 (2003), 217-224). However very early TcR signalling occurs in the absence of these events and may involve a ligand-induced conformational change in CD3 epsilon (Alarcon, loc. cit., Davis (2002), loc. cit., Gil, J. Biol. Chem. 276 (2001), 11174-11179, Gil, Cell 109 (2002), 901-912). The epsilon, gamma, delta and zeta subunits of the signalling complex associate with each other to form a CD3 epsilon-gamma heterodimer, a CD3 epsilon-delta heterodimer, and a CD3 zeta-zeta homodimer (Call, loc. cit.). Various studies have revealed that the CD3 molecules are important for the proper cell surface expression of the alpha beta TcR and normal T cell development (Berkhout, J. Biol. Chem. 263 (1988), 8528-8536, Wang, J. Exp. Med. 188 (1998), 1375-1380, Kappes, Curr. Opin. Immunol. 7 (1995), 441-447). The solution structure of the ectodomain fragments of the mouse CD3 epsilon gamma heterodimer showed that the epsilon gamma subunits are both C2-set Ig domains that interact with each other to form an unusual side-to-side dimer configuration (Sun, Cell 105 (2001), 913-923). Although the cysteine-rich stalk appears to play an important role in driving CD3 dimerization (Su, loc. cit., Borroto, J. Biol. Chem. 273 (1998), 12807-12816), interaction by means of the extracellular domains of CD3 epsilon and CD3 gamma is sufficient for assembly of these proteins with TcR beta (Manolios, Eur. J. Immunol. 24 (1994), 84-92, Manolios & Li, Immunol. Cell Biol. 73 (1995), 532-536). Although still controversial, the dominant stoichiometry of the TcR most likely comprises one alpha beta TcR, one CD3 epsilon gamma heterodimer, one CD3 epsilon delta heterodimer and one CD3 zeta zeta homodimer (Call, loc. cit.). Given the central role of the human CD3 epsilon gamma heterodimer in the immune response, the crystal structure of this complex bound to the therapeutic antibody OKT3 has recently been elucidated (Kjer-Nielsen, PNAS 101, (2004), 7675-7680).

[0003] A number of therapeutic strategies modulate T cell immunity by targeting TcR signalling, particularly the anti-human CD3 monoclonal antibodies (mAbs) that are widely used clinically in immunosuppressive regimes. The CD3-specific mouse mAb OKT3 was the first mAb licensed for use in humans (Sgro, Toxicology 105 (1995), 23-29) and is widely used clinically as an immunosuppressive agent in transplantation (Chatenoud, Clin. Transplant 7 (1993), 422-430, Chatenoud, Nat. Rev. Immunol. 3 (2003), 123-132, Kumar, Transplant. Proc. 30 (1998), 1351-1352), type 1 diabetes (Chatenoud (2003), loc. cit.), and psoriasis (Utset, J. Rheumatol. 29 (2002), 1907-1913). Moreover, anti-CD3 mAbs can induce partial T cell signalling and clonal anergy (Smith, J. Exp. Med. 185 (1997), 1413-1422). OKT3 has been described in the literature as a potent T cell mitogen (Van Wauve, J. Immunol. 124 (1980), 2708-18) as well as a potent T cell killer (Wong, Transplantation 50 (1990), 683-9). OKT3 exhibits both of these activities in a time-dependent fashion; following early activation of T cells leading to cytokine release, upon further administration OKT3 later blocks all known T cell functions. It is due to this later blocking of T cell function that OKT3 has found such wide application as an immunosuppressant in therapy regimens for reduction or even abolition of allograft tissue rejection.

[0004] OKT3 reverses allograft tissue rejection most probably by blocking the function of all T cells, which play a major role in acute rejection. OKT3 reacts with and blocks the function of the CD3 complex in the membrane of human T cells, which is associated with the antigen recognition structure of T cells (TCR) and is essential for signal transduction. Which subunit of the TCR/CD3 is bound by OKT3 has been the subject of multiple studies. Though some evidence has pointed to a specificity of OKT3 for the epsilon-subunit of the TCR/CD3 complex (Tunnacliffe, Int. Immunol. 1 (1989), 546-50; Kjer-Nielsen, PNAS 101, (2004), 7675-7680). Further evidence has shown that OKT3 binding of the TCR/CD3 complex requires other subunits of this complex to be present (Salmeron, J. Immunol. 147 (1991), 3047-52).

[0005] Other well known antibodies specific for the CD3 molecule are listed in Tunnacliffe, Int. Immunol. 1 (1989), 546-50. As indicated above, such CD3 specific antibodies are able to induce various T cell responses such as lymphokine production (Von Wussow, J. Immunol. 127 (1981), 1197; Palacious, J. Immunol. 128 (1982), 337), proliferation (Van Wauve, J. Immunol. 124 (1980), 2708-18) and suppressor-T cell induction (Kunicka, in “Lymphocyte Typing II” 1 (1986), 223). That is, depending on the experimental conditions, CD3 specific monoclonal antibody can either inhibit or induce cytotoxicity (Leewenberg, J. Immunol. 134 (1985), 3770; Phillips, J. Immunol. 136 (1986) 1579; Platsoucas, Proc. Natl. Acad. Sci. USA 78 (1981), 4500; Itoh, Cell. Immunol. 108 (1987), 283-96; Mentzer, J. Immunol. 135 (1985), 34; Landegren, J. Exp. Med. 155 (1982), 1579; Choi (2001), Eur. J. Immunol. 31, 94-106; Xu (2000), Cell Immunol. 200, 16-26; Kimball (1995), Transpl. Immunol. 3, 212-221).

[0006] Although many of the CD3 antibodies described in the art have been reported to recognize the CD3 epsilon subunit of the CD3 complex, most of them bind in fact to conformational epitopes and, thus, only recognize CD3 epsilon in the native context of the TCR. Conformational epitopes are characterized by the presence of two or more discrete amino acid residues which are separated in the primary sequence, but come together on the surface of the molecule when the polypeptide folds into the native protein/antigen (Sela, (1969) Science 166, 1365 and Laver, (1990) Cell 61, 553-6). The conformational epitopes bound by CD3 epsilon antibodies described in the art may be separated in two groups. In the major group, said epitopes are being formed by two CD3 subunits, e.g. of the CD3 epsilon chain and the CD3 gamma or CD3 delta chain. For example, it has been found in several studies that the most widely used CD3 epsilon monoclonal antibodies OKT3, WT31, UCHT1, 7D6 and Leu-4 did not bind to cells singly transfected with the CD3-epsilon chain. However, these antibodies stained cells doubly transfected with a combination of CD3 epsilon plus either CD3 gamma or CD3 delta (Tunnacliffe, loc. cit.; Law, Int. Immunol. 14 (2002), 389-400; Salmeron, J. Immunol. 147 (1991), 3047-52; Coulie, Eur. J. Immunol. 21 (1991), 1703-9). In a second smaller group, the conformational epitope is being formed within the CD3 epsilon subunit itself. A member of this group is for instance mAb APA 1/1 which has been raised against denatured CD3 epsilon (Risueno, Blood 106 (2005), 601-8). Taken together, most of the CD3 epsilon antibodies described in the art recognize conformational epitopes located on two or more subunits of CD3. The discrete amino acid residues forming the three-dimensional structure of these epitopes may hereby be located either on the CD3 epsilon subunit itself or on the CD3 epsilon subunit and other CD3 subunits such as CD3 gamma or CD3 delta.

[0007] Another problem with respect to CD3 antibodies is that many CD3 antibodies have been found to be species-specific. Anti-CD3 monoclonal antibodies—as holds true generally for any other monoclonal antibodies—function by way of highly specific recognition of their target molecules. They recognize only a single site, or epitope, on their target CD3 molecule. For example, one of the most widely used and best characterized monoclonal antibodies specific for the CD3 complex is OKT-3. This antibody reacts with chimpanzee CD3 but not with the CD3 homolog of other primates, such as macaques, or with dog CD3 (Sandusky et al., J. Med. Primatol. 15 (1986), 441-451). Similarly, WO2005/118635 or WO2007/033230 describe human monoclonal CD3 epsilon antibodies which react with human CD3 epsilon but not with CD3 epsilon of mouse, rat, rabbit, or non-chimpanzee primates, such as rhesus monkey, cynomolgus monkey or baboon monkey. The anti-CD3 monoclonal antibody UCHT-1 is also reactive with CD3 from chimpanzee but not with CD3 from macaques (own data). On the other hand, there are also examples of monoclonal antibodies, which recognize macaque antigens, but not their human counterparts. One example of this group is monoclonal antibody FN-18 directed to CD3 from macaques (Uda et al., J. Med. Primatol. 30 (2001), 141-147). Interestingly, it has been found that peripheral lymphocytes from about 12% of cynomolgus monkeys lacked reactivity with anti-rhesus monkey CD3 monoclonal antibody (FN-18) due to a polymorphism of the CD3 antigen in macaques. Uda et al. described a substitution of two amino acids in the CD3 sequence of cynomolgus monkeys, which are not reactive with FN-18 antibodies, as compared to CD3 derived from animals, which are reactive with FN-18 antibodies (Uda et al., J Med Primatol. 32 (2003), 105-10; Uda et al., J Med Primatol. 33 (2004), 34-7).

[0008] The discriminatory ability, i.e. the species specificity, inherent not only to CD3 monoclonal antibodies (and fragments thereof), but to monoclonal antibodies in general, is a significant impediment to their development as therapeutic agents for the treatment of human diseases. In order to obtain market approval any new candidate medication must pass through rigorous testing. This testing can be subdivided into preclinical and clinical phases: Whereas the latter—further subdivided into the generally known clinical phases I, II and III—is performed in human patients, the former is performed in animals. The aim of pre-clinical testing is to prove that the drug candidate has the desired activity and most importantly is safe. Only when the safety in animals and possible effectiveness of the drug candidate has been established in preclinical testing this drug candidate will be approved for clinical testing in humans by the respective regulatory authority. Drug candidates can be tested for safety in animals in the following three ways, (i) in a relevant species, i.e. a species where the drug candidates can recognize the ortholog antigens, (ii) in a transgenic animal containing the human antigens and (iii) by use of a surrogate for the drug candidate that can bind the ortholog antigens present in the animal. Limitations of transgenic animals are that this technology is typically limited to rodents. Between rodents and man there are significant differences in the physiology and the safety results cannot be easily extrapolated to humans. The limitations of a surrogate for the drug candidate are the different composition of matter compared to the actual drug candidate and often the animals used are rodents with the limitation as discussed above. Therefore, preclinical data generated in rodents are of limited predictive power with respect to the drug candidate. The approach of choice for safety testing is the use of a relevant species, preferably a lower primate. The limitation now of monoclonal antibodies suitable for therapeutic intervention in man described in the art is that the relevant species are higher primates, in particular chimpanzees. Chimpanzees are considered as endangered species and due to their human-like nature, the use of such animals for drug safety testing has been banned in Europe and is highly restricted elsewhere. CD3 has also been successfully used as a target for bispecific single chain antibodies in order to redirect cytotoxic T cells to pathological cells, resulting in the depletion of the diseased cells from the respective organism (WO 99/54440; WO 04/106380). For example, Bargou et al. (Science 321 (2008): 974-7) have recently reported on the clinical activity of a CD19×CD3 bispecific antibody construct called blinatumomab, which has the potential to engage all cytotoxic T cells in human patients for lysis of cancer cells. Doses as low as 0.005 milligrams per square meter per day in non-Hodgkin's lymphoma patients led to an elimination of target cells in blood. Partial and complete tumor regressions were first observed at a dose level of 0.015 milligrams, and all seven patients treated at a dose level of 0.06 milligrams experienced a tumor regression. Blinatumomab also led to clearance of tumor cells from bone marrow and liver. Though this study established clinical proof of concept for the therapeutic potency of the bispecific single chain antibody format in treating blood-cell derived cancer, there is still need for successful concepts for therapies of other cancer types.

[0009] In 2008, an estimated 186,320 men will be newly diagnosed with prostate cancer in the United States and about 28,660 men will die from the disease. The most recent report available on cancer mortality shows that, in 2004, the overall death rate from prostate cancer among American men was 25 per 100,000. In the late 1980s, the widespread adoption of the prostate-specific antigen (PSA) test represented a major improvement in the management of prostate cancer. This test measures the amount of PSA protein in the blood, which is often elevated in patients with prostate cancer. In 1986, the U.S. Food and Drug Administration approved the use of the PSA test to monitor patients with prostate cancer and, in 1994, additionally approved its use as a screening test for this disease. Due to the widespread implementation of PSA testing in the United States, approximately 90 percent of all prostate cancers are currently diagnosed at an early stage, and, consequently, men are surviving longer after diagnosis. However, the results of two ongoing clinical trials, the NCI-sponsored Prostate, Lung, Colorectal, and Ovarian (PLCO) screening trial and the European Study of Screening for Prostate Cancer (ERSPC) will be needed to determine whether PSA screening actually saves lives. Ongoing clinical trials over the past 25 years have investigated the effectiveness of natural and synthetic compounds in the prevention of prostate cancer. For example, the Prostate Cancer Prevention Trial (PCPT), which enrolled nearly 19,000 healthy men, found that finasteride, a drug approved for the treatment of benign prostatic hyperplasia (BPH), which is a noncancerous enlargement of the prostate, reduced the risk of developing prostate cancer by 25 percent. Another trial, the Selenium and Vitamin E Cancer Prevention Trial (SELECT), is studying more than 35,000 men to determine whether daily supplements of selenium and vitamin E can reduce the incidence of prostate cancer in healthy men. Other prostate cancer prevention trials are currently evaluating the protective potential of multivitamins, vitamins C and D, soy, green tea, and lycopene, which is a natural compound found in tomatoes. One study, reported in 2005, showed that specific genes were fused in 60 to 80 percent of the prostate tumors analyzed. This study represents the first observation of non-random gene rearrangements in prostate cancer. This genetic alteration may eventually be used as a biomarker to aid in the diagnosis and, possibly, treatment of this disease. Other studies have shown that genetic variations in a specific region of chromosome 8 can increase a man's risk of developing prostate cancer. These genetic variations account for approximately 25 percent of the prostate cancers that occur in white men. They are the first validated genetic variants that increase the risk of developing prostate cancer and may help scientists better understand the genetic causes of this disease. There is also ongoing research that examines how proteins circulating in a patient's blood can be used to improve the diagnosis of prostate and other cancers. In 2005, scientists identified a group of specific proteins that are produced by a patient's immune system in response to prostate tumors. These proteins, a type of autoantibody, were able to detect the presence of prostate cancer cells in blood specimens with greater than 90 percent accuracy. When used in combination with PSA, these and other blood proteins may eventually be used to reduce the number of false-positive results obtained with PSA testing alone and, therefore, reduce the large number of unnecessary prostate biopsies that are performed each year due to false-positive PSA test results.

[0010] Apart from PSA, several other markers for prostate cancer have been identified, including e.g. the six-transmembrane epithelial antigen of the prostate (STEAP) (Hubert et al., PNAS 96 (1999), 14523-14528), the prostate-specific membrane antigen (PSM/PSMA) (Israeli et al., Cancer Res. 53 (1993), 227-230) and the Prostate stem cell antigen (PSCA) (Reiter et al., Proc. Nat. Acad. Sci. 95: 1735-1740, 1998). Prostate stem cell antigen (PSCA) is a 123 amino acid protein first identified when looking for genes upregulated during cancer progression in the LAPC-4 prostate xenograft model (Reiter et al., loc. cit.). It is a glycosyl phosphatidylinositol-anchored cell-surface protein that belongs to the family of Thy-1/Ly-6 surface antigens. PSCA bears 30% homology to stem cell antigen type 2. Although the function of PSCA is yet to be elucidated, homologues of PSCA have diverse activities, and have themselves been implicated in carcinogenesis. Stem cell antigen type 2 has been shown to prevent apoptosis in immature thymocytes (Glasson and Coverdale, PNAS 91 (1994), 5296-5300). Thy-1 activates T cells by signalling through src tyrosine kinases (Amoui et al., Eur. J. Immunol. 27 (1997), 1881-86). Ly-6 genes have been implicated in tumorigenesis and cell adhesion (Schrijvers et al., Exp. Cell. Res. 196 (1991), 264-69). Initial messenger RNA studies and subsequent monoclonal antibody (mAb) staining have revealed that PSCA is expressed on the cell surface of normal and malignant prostate cells (Reiter et al., loc. cit.; Gu et al., Oncogene 19 (2000), 1288-96; Ross et al., Cancer Res. 62 (2002), 2546-53). In normal prostate, PSCA mRNA has been detected in a subset of basal and secretory cells. In prostate carcinoma, PSCA mRNA expression has been detected in approximately 50-80% of primary and approximately 70% of metastatic cancers (Reiter et al., loc. cit.). Immunohistochemistry has been reported on 112 primary prostate cancers and nine prostate cancers metastatic to bone (Gu et al., loc. cit.). PSCA expression was detected in 94% and overexpressed in 40% of clinically localized prostate cancers. High levels of PSCA protein expression were also detected in nine out of nine prostate cancer bone metastases examined. Outside the prostate, PSCA is detected in the umbrella cell layer of the transitional epithelium, some renal collecting ducts, neuroendocrine cells of the stomach, and placental trophoblasts. Importantly, recent studies have reported an overexpression of PSCA in a large proportion of pancreatic cancers and invasive and non-invasive transitional cell carcinomas (Amara et al., Cancer Res. 61 (2001), 4660-4665; Argani et al., Cancer Res. 61 (2001), 4320-24). Because of its cell surface expression and its overexpression in a substantial proportion of various cancers, PSCA has been discussed as target for treatment strategies in cancer. However, future clinical correlation will be required to validate this possibility.

[0011] The expression of certain CD antigens is highly restricted to specific lineage lymphohematopoietic cells and over the past several years, antibodies directed against lymphoid-specific antigens have been used to develop treatments that were effective either in vitro or in animal models. In this respect CD19 has proved to be a very useful target. CD19 is expressed in the whole B lineage from the pro B cell to the mature B cell, it is not shed, is uniformly expressed on all lymphoma cells, and is absent from stem cells (Haagen, Clin Exp Immunol 90 (1992), 368-75, 14; Uckun, Proc. Natl. Acad. Sci. USA 85 (1988), 8603-7). The CD19 is involved in the development of certain B-cell mediated diseases such as various forms of non-Hodgkin lymphoma, B-cell mediated autoimmune diseases or the depletion of B-cells.

[0012] A further example for a molecule which is involved in the progression and spread of numerous human cancer types is the hepatocyte growth factor receptor MET (C-MET). The MET oncogene, encoding the receptor tyrosin kinase (RTK) for hepatocyte growth factor (HGF) and Scatter Factor (SF), controls genetic programs leading to cell growth, invasion, and protection from apoptosis. Deregulated activation of MET is critical not only for the acquisition of tumorigenic properties but also for the achievement of the invasive phenotype (Trusolino, L. & Comoglio, P. M. (2002) Nat. Rev. Cancer 2, 289-300). The role of MET in human tumors emerged from several experimental approaches and was unequivocally proven by the discovery of MET-activating mutations in inherited forms of carcinomas (Schmidt et al., Nat. Genet. 16 (1997), 68-73; Kim et al., J. Med. Genet. 40 (2003), e97). MET constitutive activation is frequent in sporadic cancers, and several studies have shown that the MET oncogene is overexpressed in tumors of specific histotypes or is activated through autocrine mechanisms (for a list see http://www.vai.org/met/). Besides, the MET gene is amplified in hematogenous metastases of colorectal carcinomas (Di Renzo et al., Clin. Cancer Res. 1 (1995), 147-154).

[0013] The Scatter Factor (SF) secreted in culture by fibroblasts, that has the ability to induce intercellular dissociation of epithelial cells, and the Hepatocyte Growth Factor (HGF), a potent mitogen for hepatocytes in culture derived from platelets or from blood of patients with acute liver failure, independently identified as Met ligands turned out to be the same molecule. Met and SF/HGF are widely expressed in a variety of tissues. The expression of Met (the receptor) is normally confined to cells of epithelial origin, while the expression of SF/HGF (the ligand) is restricted to cells of mesenchymal origin.

[0014] Met is a transmembrane protein produced as a single-chain precursor. The precursor is proteolytically cleaved at a furin site to produce a highly glycosylated and entirely extracellular α-subunit of 50 kd and a β-subunit of 145 kd with a large extracellular region (involved in binding the ligand), a membrane spanning segment, and an intracellular region (containing the catalytic activity) (Giordano (1989) 339: 155-156). The α and β chains are disulphide linked. The extracellular portion of Met contains a region of homology to semaphorins (Sema domain, which includes the full α chain and the N-terminal part of the β chain of Met), a cysteine-rich Met Related Sequence (MRS) followed by glycineproline-rich (G-P) repeats, and four Immunoglobuline-like structures (Birchmeier et al., Nature Rev. 4 (2003), 915-25). The intracellular region of Met contains three regions: (1) a juxtamembrane segment that contains: (a) a serine residue (Ser 985) that, when phosphorylated by protein kinase C or by Ca²⁺ calmodulin-dependent kinases downregulates the receptor kinase activity Gandino et al., J. Biol. Chem. 269 (1994), 1815-20); and (b) a tyrosine (Tyr 1003) that binds the ubiquitin ligase CbI responsible for Met polyubiquitination, endocytosis and degradation (Peschard et al., Mol. Cell 8 (2001), 995-1004); (2) the tyrosine kinase domain that, upon receptor activation, undergoes transphosphorylation on Tyr1234 and Tyr1235; (3) the C-terminal region, which comprises two crucial tyrosines (Tyr1349 and Tyr1356) inserted in a degenerate motif that represents a multisubstrate docking site capable of recruiting several downstream adaptors containing Src homology-2 (SH2) domains Met receptor, as most Receptor Tyrosine Kinases (RTKs) use different tyrosines to bind specific signaling molecules. The two tyrosines of the docking sites have been demonstrated to be necessary and sufficient for the signal transduction both in vitro and in vivo (Maina et al., Cell 87 (1996), 531-542; Ponzetto et al., Cell 77 (1994), 261-71).

[0015] Though potent and selective preclinical drug candidates have been developed using C-MET as a tumor target, follow-up clinical trials have to reveal whether these drugs are indeed safe and show therapeutic efficacy in humans. In light of these uncertainties, there is still need for novel therapeutic concepts for cancer.

[0016] Cancer has surpassed heart disease as the top killer of Americans under 85, in 2005. Today, cancer ranks behind cardiovascular diseases as the second leading cause of death in Germany. Unless dramatic breakthroughs are achieved in cancer prevention in the next few years comparable to those achieved for cardiovascular disease, cancer will become the leading cause of death in Germany within 15-20 years. Inhibition of tumor angiogenesis is one of the anticancer strategies which has generated much excitement among clinicians and cancer research scientists in the last few years. In the course of these research efforts, several tumor endothelial markers have been identified. Tumor endothelial markers (TEMs) like Endosialin (=TEM1 or CD248) are overexpressed during tumor angiogenesis (St. Croix et al., Science 289 (2000), 1197-1202). Despite the fact that their functions have not been characterized in detail so far, it is well established that they are strongly expressed on vascular endothelial cells in developing embryos and tumors studies (Carson-Walter et al., Cancer Res. 61: 6649-6655, 2001). Accordingly, Endosialin, a 165-kDa type I transmembrane protein, is expressed on the cell surface of tumor blood vessel endothelium in a broad range of human cancers but not detected in blood vessels or other cell types in many normal tissues. It is a C-type lectin-like molecule of 757 amino acids composed of a signal leader peptide, five globular extracellular domains (including a C-type lectin domain, one domain with similarity to the Sushi/ccp/scr pattern, and three EGF repeats), followed by a mucin like region, a transmembrane segment, and a short cytoplasmic tail (Christian et al., J. Biol. Chem. 276: 7408-7414, 2001). The Endosialin core protein carries abundantly sialylated, O-linked oligosaccharides and is sensitive to O-sialoglycoprotein endopeptidase, placing it in the group of sialomucin-like molecules. The N-terminal 360 amino acids of Endosialin show homology to thrombomodulin, a receptor involved in regulating blood coagulation, and to complement receptor C1qRp. This structural relationship indicates a function for Endosialin as a tumor endothelial receptor. Although Endosialin mRNA is ubiquitously expressed on endothelial cells in normal human and murine somatic tissues, Endosialin protein is largely restricted to the corpus luteum and highly angiogenic tissues such as the granular tissue of healing wounds or tumors (Opaysky et al., J. Biol. Chem. 276 (2001, 38795-38807; Rettig et al., PNAS 89 (1992), 10832-36). Endosialin protein expression is upregulated on tumor endothelial cells of carcinomas (breast, kidney, lung, colorectal, colon, pancreas mesothelioma), sarcomas, and neuroectodermal tumors (melanoma, glioma, neuroblastoma) (Rettig et al., loc. cit.). In addition, Endosialin is expressed at a low level on a subset of tumor stroma fibroblasts (Brady et al., J. Neuropathol. Exp. Neurol. 63 (2004), 1274-83; Opaysky et al., loc. cit.). Because of its restricted normal tissue distribution and abundant expression on tumor endothelial cells of many different types of solid tumors, Endosialin has been discussed as a target for antibody-based antiangiogenic treatment strategies of cancer. However, so far, there are no effective therapeutic approaches using Endosialin as a tumor endothelial target.

[0017] A molecule which is very frequently and highly expressed on the majority of human adenocarcinoma and several squamous cell carcinoma cells is EpCAM (CD326) (Went et al., Br. J. Cancer 94 (20006), 128-135). Recent studies have shown that EpCAM is a signalling molecule that can upregulate nuclear expression of the proto-oncogene c-Myc and cyclins (Munz et al., Oncogene 23 (2004), 5748-58). When overexpressed in quiescent cells, EpCAM induces cell proliferation, growth factor independence and growth of colonies in soft agar, which are hallmarks of oncogenic proteins. When EpCAM expression is knocked down by small interfering RNA (siRNA) in breast cancer cells, such cells cease to proliferate, migrate and be invasive (Osta et al., Cancer Res. 64 (2004), 5818-24). This oncogenic signalling of EpCAM may explain why EpCAM overexpression correlates with poor overall survival in a number of human malignancies, including breast and ovarian cancer (Spizzo et al., Gynecol. Oncol. 103 (2006), 483-8). EpCAM has already been employed as a target antigen in several antibody-based therapeutic approaches, including a human antibody (Oberneder et al., Eur. J. Cancer 42 (2006), 2530-8) and an EpCAM×CD3 single chain bispecific antibody called MT110. The characteristics of MT110 have recently been described in detail (Brischwein et al., 43 (2006), 1129-43). This antibody is active against a variety of human carcinoma lines expressing the target antigen and is currently being tested in a phase I study for safety and early signs of efficacy.

[0018] More specifically, cancer has surpassed heart disease as the top killer of Americans under 85 in 2005. Today, cancer ranks behind cardiovascular diseases as the second leading cause of death in Germany. Unless dramatic breakthroughs are achieved in cancer prevention in the next few years comparable to those achieved for cardiovascular disease, cancer will become the leading cause of death in Germany within 15-20 years. Among the more than 100 types of different cancers, epithelial cancer is the leading cause of cancer deaths in Germany. In epithelial cancer, invasion and metastasis of malignant epithelial cells into normal tissues is accompanied by adaptive changes in the mesenchyme-derived supporting stroma of the target organs. Altered gene expression in these non-transformed stromal cells has been discussed to provide potential targets for therapy. The cell surface protease fibroblast activation protein alpha (FAP alpha) is one example for such a target of activated tumor fibroblasts. Fibroblast activation protein alpha is an inducible cell surface glycoprotein that has originally been identified in cultured fibroblasts using monoclonal antibody F19. Immunohistochemical studies have shown that FAP alpha is transiently expressed in certain normal fetal mesenchymal tissues but that normal adult tissues as well as malignant epithelial, neural, and hematopoietic cells are generally FAP alpha-negative. However, most of the common types of epithelial cancers contain abundant FAP alpha-reactive stromal fibroblasts. Scanlan et al. (Proc. Nat. Acad. Sci. 91: 5657-5661, 1994) cloned a FAP alpha cDNA from a WI-38 human fibroblast cDNA expression library by immunoselection using antibody F19. The predicted 760-amino acid human FAP alpha protein is a type II integral membrane protein with a large C-terminal extracellular domain, which contains 6 potential N-glycosylation sites, 13 cysteine residues, and 3 segments that correspond to highly conserved catalytic domains of serine proteases; a hydrophobic transmembrane segment; and a short cytoplasmic tail. FAP-alpha shows 48% amino acid identity with dipeptidyl peptidase IV (DPP4) and 30% identity with DPP4-related protein (DPPX). Northern blot analysis detected a 2.8-kb FAP alpha mRNA in fibroblasts. Seprase is a 170-kD integral membrane gelatinase whose expression correlates with the invasiveness of human melanoma and carcinoma cells. Goldstein et al. (Biochim. Biophys. Acta 1361: 11-19, 1997) cloned and characterized the corresponding seprase cDNA. The authors found that seprase and FAP alpha are the same protein and products of the same gene. Pineiro-Sanchez et al. (J. Biol. Chem. 272: 7595-7601, 1997) isolated seprase/FAP alpha protein from the cell membranes and shed vesicles of human melanoma LOX cells. Serine protease inhibitors blocked the gelatinase activity of seprase/FAP alpha, suggesting that seprase/FAP alpha contains a catalytically active serine residue(s). The authors found that seprase/FAP alpha is composed of monomeric, N-glycosylated 97-kD subunits that are proteolytically inactive. They concluded that seprase/FAP alpha is similar to DPP4 in that their proteolytic activities are dependent upon subunit association. Due to its degrading activity of gelatine and heat-denatured type-I and type-IV collagen, a role for seprase/FAP alpha in extracellular matrix remodeling, tumor growth, and metastasis of cancers has been suggested. Moreover, seprase/FAP alpha shows a restricted expression pattern in normal tissues and a uniform expression in the supporting stroma of many malignant tumors. Therefore, seprase/FAP alpha may be used as a target for exploring the concept of tumor stroma targeting for immunotherapy of human epithelial cancer. However, though several clinical trials have been initiated to investigate seprase's/FAP alpha's role as a tumor antigen target, conventional immunotherapy approaches or inhibition of seprase/FAP alpha enzymatic activity so far did not yet result in therapeutic efficacy (see e.g. Welt et al., J. Clin. Oncol. 12:1193-203, 1994; Narra et al., Cancer Biol. Ther. 6, 1691-9, 2007; Henry et al., Clinical Cancer Research 13, 1736-1741, 2007).

[0019] Insulin-like growth factor I receptor (IGF-IR or IGF-1R) is a receptor with tyrosine kinase activity having 70% homology with the insulin receptor IR. IGF-1R is a glycoprotein of molecular weight approximately 350,000. It is a hetero-tetrameric receptor of which each half-linked by disulfide bridges—is composed of an extracellular a-subunit and of a transmembrane [beta]-subunit. IGF-1R binds IGF 1 and IGF 2 with a very high affinity but is equally capable of binding to insulin with an affinity 100 to 1000 times less. Conversely, the 1R binds insulin with a very high affinity although the ICFs only bind to the insulin receptor with a 100 times lower affinity. The tyrosine kinase domain of IGF-1R and of 1R has a very high sequence homology although the zones of weaker homology respectively concern the cysteine-rich region situated on the alpha-subunit and the C-terminal part of the [beta]-subunit. The sequence differences observed in the a-subunit are situated in the binding zone of the ligands and are therefore at the origin of the relative affinities of IGF-1R and of 1R for the IGFs and insulin respectively. The differences in the C-terminal part of the [beta]-subunit result in a divergence in the signalling pathways of the two receptors; IGF-1R mediating mitogenic, differentiation and antiapoptosis effects, while the activation of the IR principally involves effects at the level of the metabolic pathways (Baserga et al., Biochim. Biophys. Acta, 1332: F105-126, 1997; Baserga R., Exp. Cell. Res., 253:1-6, 1999). The cytoplasmic tyrosine kinase proteins are activated by the binding of the ligand to the extracellular domain of the receptor. The activation of the kinases in its turn involves the stimulation of different intra-cellular substrates, including IRS-1, IRS-2, Shc and Grb 10 (Peruzzi F. et al., J. Cancer Res. Clin. Oncol., 125:166-173, 1999). The two major substrates of IGF-IR are IRS and Shc which mediate, by the activation of numerous effectors downstream, the majority of the growth and differentiation effects connected with the attachment of the IGFs to this receptor. The availability of substrates can consequently dictate the final biological effect connected with the activation of the IGF-1R. When IRS-1 predominates, the cells tend to proliferate and to transform. When Shc dominates, the cells tend to differentiate (Valentinis B. et al.; J. Biol. Chem. 274:12423-12430, 1999). It seems that the route principally involved for the effects of protection against apoptosis is the phosphatidyl-inositol 3-kinases (PI 3-kinases) route (Prisco M. et al., Horm. Metab. Res., 31:80-89, 1999; Peruzzi F. et al., J. Cancer Res. Clin. Oncol., 125:166-173, 1999). The role of the IGF system in carcinogenesis has become the subject of intensive research in the last ten years. This interest followed the discovery of the fact that in addition to its mitogenic and antiapoptosis properties, IGF-1R seems to be required for the establishment and the maintenance of a transformed phenotype. In fact, it has been well established that an overexpression or a constitutive activation of IGF-1R leads, in a great variety of cells, to a growth of the cells independent of the support in media devoid of fetal calf serum, and to the formation of tumors in nude mice. This in itself is not a unique property since a great variety of products of overexpressed genes can transform cells, including a good number of receptors of growth factors. However, the crucial discovery which has clearly demonstrated the major role played by, IGF-1R in the transformation has been the demonstration that the R-cells, in which the gene coding for IGF-1R has been inactivated, are totally refractory to transformation by different agents which are usually capable of transforming the cells, such as the E5 protein of bovine papilloma virus, an overexpression of EGFR or of PDGFR, the T antigen of SV 40, activated ras or the combination of these two last factors (Sell C. et al., Proc. Natl. Acad. Sci., USA, 90: 11217-11221, 1993; Sell C. et al., Mol. Cell. Biol., 14:3604-3612, 1994; Morrione A. J., Virol., 69:5300-5303, 1995; Coppola D. et al., Mol. Cell. Biol., 14:458a-4595, 1994; DeAngelis T et al., J. Cell. Physiol., 164:214-221, 1995). IGF-1R is expressed in a great variety of tumors and of tumor lines and the IGFs amplify the tumor growth via their attachment to IGF-1R. Other arguments in favor of the role of IGF-IR in carcinogenesis come from studies using murine monoclonal antibodies directed against the receptor or using negative dominants of IGF-IR. In effect, murine monoclonal antibodies directed against IGF-1R inhibit the proliferation of numerous cell lines in culture and the growth of tumor cells in vivo (Arteaga C. et al., Cancer Res., 49:6237-6241, 1989 Li et al., Biochem. Biophys. Res. Corn., 196:92-98, 1993; Zia F et al., J. Cell. Biol., 24:269-275, 1996; Scotlandi K et al., Cancer Res., 58:4127-4131, 1998). It has likewise been shown in the works of Jiang et al. (Oncogene, 18:6071-6077, 1999) that a negative dominant of IGF-1R is capable of inhibiting tumor proliferation.

[0020] Though there has been put much effort in identifying novel targets for therapeutic approaches for cancer, cancer is yet one of the most frequently diagnosed diseases. In light of this, there is still need for effective treatments for cancer.

[0021] The present invention provides for a bispecific single chain antibody molecule comprising a first binding domain capable of binding to an epitope of human and non-chimpanzee primate CD3ε (epsilon) chain, wherein the epitope is part of an amino acid sequence comprised in the group consisting of SEQ ID NOs. 2, 4, 6, and 8; and a second binding domain capable of binding to an antigen selected from the group consisting of Prostate stem cell antigen (PSCA), B-Lymphocyte antigen CD19 (CD19), hepatocyte growth factor receptor (C-MET), Endosialin, the EGF-like domain 1 of EpCAM, encoded by exon 2, Fibroblast Activation Protein Alpha (FAP alpha) and Insulin-like growth factor I receptor (IGF-IR or IGF-1R).

[0022] Though T cell-engaging bispecific single chain antibodies described in the art have great therapeutic potential for the treatment of malignant diseases, most of these bispecific molecules are limited in that they are species specific and recognize only human antigen, and—due to genetic similarity—likely the chimpanzee counterpart. The advantage of the present invention is the provision of a bispecific single chain antibody comprising a binding domain exhibiting cross-species specificity to human and non-chimpanzee primate of the CD3 epsilon chain.

[0023] In the present invention, an N-terminal 1-27 amino acid residue polypeptide fragment of the extracellular domain of CD3 epsilon was surprisingly identified which—in contrast to all other known epitopes of CD3 epsilon described in the art—maintains its three-dimensional structural integrity when taken out of its native environment in the CD3 complex (and optionally fused to a heterologous amino acid sequence such as EpCAM or an immunoglobulin Fc part).

[0024] The present invention, therefore, provides for a bispecific single chain antibody molecule comprising a first binding domain capable of binding to an epitope of an N-terminal 1-27 amino acid residue polypeptide fragment of the extracellular domain of CD3 epsilon (which CD3 epsilon is, for example, taken out of its native environment and/or comprised by (presented on the surface of) a T-cell) of human and at least one non-chimpanzee primate CD3 epsilon chain, wherein the epitope is part of an amino acid sequence comprised in the group consisting of SEQ ID NOs. 2, 4, 6, and 8; and a second binding domain capable of binding to prostate-specific membrane antigen (PSMA). Preferred non-chimpanzee primates are mentioned herein elsewhere. At least one (or a selection thereof or all) primate(s) selected from Callithrix jacchus; Saguinus oedipus, Saimiri sciureus, and Macaca fascicularis (either SEQ ID 2225 or 2226 or both), is (are) particularly preferred. Macaca mulatta, also known as Rhesus Monkey is also envisaged as another preferred primate. It is thus envisaged that antibodies of the invention bind to (are capable of binding to) the context independent epitope of an N-terminal 1-27 amino acid residue polypeptide fragment of the extracellular domain of CD3 epsilon of human and Callithrix jacchus, Saguinus oedipus, Saimiri sciureus, and Macaca fascicularis (either SEQ ID 2225 or 2226 or both), and optionally also to Macaca mulatta. A bispecific single chain antibody molecule comprising a first binding domain as defined herein can be obtained (is obtainable by) or can be manufactured in accordance with the protocol set out in the appended Examples (in particular Example 2). To this end, it is envisaged to (a) immunize mice with an N-terminal 1-27 amino acid residue polypeptide fragment of the extracellular domain of CD3 epsilon of human and/or Saimiri sciureus; (b) generation of an immune murine antibody scFv library; (c) identification of CD3 epsilon specific binders by testing the capability to bind to at least SEQ ID NOs. 2, 4, 6, and 8.

[0025] The context-independence of the CD3 epitope provided in this invention corresponds to the first 27 N-terminal amino acids of CD3 epsilon or functional fragments of this 27 amino acid stretch. The phrase “context-independent,” as used herein in relation to the CD3 epitope means that binding of the herein described inventive binding molecules/antibody molecules does not lead to a change or modification of the conformation, sequence, or structure surrounding the antigenic determinant or epitope. In contrast, the CD3 epitope recognized by a conventional CD3 binding molecule (e.g. as disclosed in WO 99/54440 or WO 04/106380) is localized on the CD3 epsilon chain C-terminally to the N-terminal 1-27 amino acids of the context-independent epitope, where it only takes the correct conformation if it is embedded within the rest of the epsilon chain and held in the right sterical position by heterodimerization of the epsilon chain with either the CD3 gamma or delta chain.

[0026] Anti-CD3 binding molecules/domains as part of a bispecific single chain antibody molecule as provided herein and generated (and directed) against a context-independent CD3 epitope provide for a surprising clinical improvement with regard to T cell redistribution and, thus, a more favourable safety profile. Without being bound by theory, since the CD3 epitope is context-independent, forming an autonomous selfsufficient subdomain without much influence on the rest of the CD3 complex, the CD3 binding molecules/domains provided herein induce less allosteric changes in CD3 conformation than the conventional CD3 binding molecules, which recognize context-dependent CD3 epitopes (e.g. as disclosed in WO 99/54440 or WO 04/106380).

[0027] The context-independence of the CD3 epitope which is recognized by the CD3 binding domain of the bispecific single chain antibody of the invention (PSCA×CD3, CD19×CD3, C-MET×CD3. Endosialin×CD3, EpCAM×CD3, IGF-1R×CD3 or FAPα×CD3) is associated with less or no T cell redistribution (T cell redistribution equates with an initial episode of drop and subsequent recovery of absolute T cell counts) during the starting phase of treatment with said bispecific single chain antibodies of the invention. This results in a better safety profile of the bispecific single chain antibodies of the invention compared to conventional CD3 binding molecules known in the art, which recognize context-dependent CD3 epitopes. Particularly, because T cell redistribution during the starting phase of treatment with CD3 binding molecules is a major risk factor for adverse events, like CNS adverse events, the bispecific single chain antibodies of the invention has a substantial safety advantage over the CD3 binding molecules known in the art by recognizing a context-independent rather than a context-dependent CD3 epitope. Patients with such CNS adverse events related to T cell redistribution during the starting phase of treatment with conventional CD3 binding molecules usually suffer from confusion and disorientation, in some cases also from urinary incontinence. Confusion is a change in mental status in which the patient is not able to think with his or her usual level of clarity. The patient usually has difficulties to concentrate and thinking is not only blurred and unclear but often significantly slowed down. Patients with CNS adverse events related to T cell redistribution during the starting phase of treatment with conventional CD3 binding molecules may also suffer from loss of memory. Frequently, the confusion leads to the loss of ability to recognize people, places, time or dates. Feelings of disorientation are common in confusion, and the decision-making ability is impaired. CNS adverse events related to T cell redistribution during the starting phase of treatment with conventional CD3 binding molecules may further comprise blurred speech and/or word finding difficulties. This disorder may impair both, the expression and understanding of language as well as reading and writing. Besides urinary incontinence, vertigo and dizziness may also accompany CNS adverse events related to T cell redistribution during the starting phase of treatment with conventional CD3 binding molecules in some patients.

[0028] The maintenance of the three-dimensional structure within the mentioned 27 amino acid N-terminal polypeptide fragment of CD3 epsilon can be used for the generation of, preferably human, binding domains which are capable of binding to the N-terminal CD3 epsilon polypeptide fragment in vitro and to the native (CD3 epsilon subunit of the) CD3 complex on T cells in vivo with the same binding affinity. These data strongly indicate that the N-terminal fragment as described herein forms a tertiary conformation, which is similar to its structure normally existing in vivo. A very sensitive test for the importance of the structural integrity of the amino acids 1-27 of the N-terminal polypeptide fragment of CD3 epsilon was performed. Individual amino acids of amino acids 1-27 of the N-terminal polypeptide fragment of CD3 epsilon were changed to alanine (alanine scanning) to test the sensitivity of the amino acids 1-27 of the N-terminal polypeptide fragment of CD3 epsilon for minor disruptions. The CD3 binding domains as part of the bispecific single chain antibodies of the invention were used to test for binding to the alanine-mutants of amino acids 1-27 of the N-terminal polypeptide fragment of CD3 epsilon (see appended Example 5). Individual exchanges of the first five amino acid residues at the very N-terminal end of the fragment and two of the amino acids at positions 23 and 25 of the amino acids 1-27 of the N-terminal polypeptide fragment of CD3 epsilon were critical for binding of the antibody molecules. The substitution of amino acid residues in the region of position 1-5 comprising the residues Q (Glutamine at position 1), D (Aspartic acid at position 2), G (Glycine at position 3), N (Asparagine at position 4), and E (Glutamic acid at position 5) to Alanine abolished binding of the, preferably human, bispecific single chain antibodies of the invention to said fragment. While, for at least some of the, preferably human bispecific single chain antibodies of the invention, two amino acid residues at the C-terminus of the mentioned fragment T (Threonine at position 23) and I (Isoleucine at position 25) reduced the binding energy to the, preferably human, bispecific single chain antibodies of the invention.

[0029] Unexpectedly, it has been found that the thus isolated, preferably human, bispecific single chain antibodies of the invention not only recognize the human N-terminal fragment of CD3 epsilon, but also the corresponding homologous fragments of CD3 epsilon of various primates, including New-World Monkeys (Marmoset, Callithrix jacchus; Saguinus oedipus; Saimiri sciureus) and Old-World Monkeys (Macaca fascicularis, also known as Cynomolgus Monkey; or Macaca mulatta, also known as Rhesus Monkey). Thus, multi-primate specificity of the bispecific single chain antibodies of the invention was detected. The following sequence analyses confirmed that human and primates share a highly homologous sequence stretch at the N-terminus of the extracellular domain of CD3 epsilon.

[0030] The amino acid sequence of the aformentioned N-terminal fragments of CD3 epsilon are depicted in SEQ ID No. 2 (human), SEQ ID No. 4 (Callithrix jacchus); SEQ ID No. 6 (Saguinus oedipus); SEQ ID No. 8 (Saimiri sciureus); SEQ ID No. 2225 QDGNEEMGSITQTPYQVSISGTTILTC or SEQ ID No. 2226 QDGNEEMGSITQTPYQVSISGTTVILT (Macaca fascicularis, also known as Cynomolgus Monkey), and SEQ ID No. 2227 QDGNEEMGSITQTPYHVSISGTTVILT (Macaca mulatta, also known as Rhesus Monkey).

[0031] In one embodiment of the invention the second binding domain of the PSCA×CD3 bispecific single chain antibody of the invention binds to the Prostate stem cell antigen (PSCA). In alternative embodiments the second binding domain binds to CD19, C-MET, Endosialin (CD248), EpCAM, FAPα or IGF-1R. As shown in the following examples, the second binding domain of the EpCAM×CD3 bispecific single chain antibody of the invention binds to amino acid residues 26 to 61 of the EGF-like domain 1 of EpCAM which is encoded by Exon 2 of the EpCAM gene. Said amino acid residues 26 to 61 of the EGF-like domain 1 of human EpCAM are shown in SEQ ID NO. 571. Thus, the EpCAM-directed bispecific single chain molecules of this invention form a unique own class of EpCAM-binding molecules, that is clearly differentiated from EpCAM-binding molecules based on the EpCAM-binder HD69 described earlier. Said EpCAM-binder HD69 bind to a different epitope (i.e. an epitope not localized in the EGF-like domain 1 of human EpCAM).

[0032] Preferably, the second binding domain of the PSCA×CD3 (respectively CD19×CD3, C-MET×CD3, Endosialin×CD3, EpCAM×CD3, IGF-1R×CD3 or FAPα×CD3) bispecific single chain antibody binds to the human PSCA (respectively CD19, C-MET, Endosialin, EpCAM, IGF-1R or FAPα) or a non-chimpanzee primate PSCA (respectively CD19, C-MET, Endosialin, EpCAM, IGF-1R or FAPα); more preferred it binds to the human PSCA (respectively CD19, C-MET, Endosialin, EpCAM, IGF-1R or FAPα) and a non-chimpanzee primate PSCA (respectively CD19, C-MET, Endosialin, EpCAM, IGF-1R or FAPα) and therefore is cross-species specific; even more preferred to the human PSCA (respectively CD19, C-MET, Endosialin, EpCAM, IGF-1R or FAPα) and the macaque PSCA (respectively CD19, C-MET, Endosialin, EpCAM, IGF-1R or FAPα) (and therefore is cross-species specific as well). Particularly preferred, the macaque PSCA (respectively CD19, C-MET, Endosialin, EpCAM, IGF-1R or FAPα) is the Cynomolgus monkey PSCA (respectively CD19, C-MET, Endosialin, EpCAM, IGF-1R or FAPα) and/or the Rhesus monkey PSCA (respectively CD19, C-MET, Endosialin, EpCAM, IGF-1R or FAPα). It is to be understood, that the second binding domain of the EpCAM×CD3 bispecific single chain antibody of the invention preferably binds to the EGF-like domain 1 of the non-chimpanzee primate EpCAM which is encoded by Exon 2 of the non-chimpanzee primate EpCAM gene. As indicated above, the non-chimpanzee primate EpCAM is preferably a macaque EpCAM, more preferably the Cynomolgus monkey EpCAM and/or the Rhesus monkey EpCAM.

[0033] However, it is not excluded from the scope of the present invention, that the second binding domain may also bind to PSCA (respectively CD19, C-MET, Endosialin, EpCAM, IGF-1R or FAPα) homologs of other species, such as to the chimpanzee PSCA (respectively CD19, C-MET, Endosialin, EpCAM, IGF-1R or FAPα) or the PSCA (respectively CD19, C-MET, Endosialin, EpCAM, IGF-1R or FAPα) homolog in rodents.

[0034] It will be understood that in a preferred embodiment, the cross-species specificity of the first and second binding domain of the antibodies of the invention is identical.

[0035] Prostate cancer is the second most cancer in men. For 2008, it is estimated that 186,320 men will be newly diagnosed with prostate cancer in the United States and about 28,660 men will die from the disease (see e.g. http://www.cancer.gov/cancertopics/types/prostate). Prostate cancer risk is strongly related to age: very few cases are registered in men under 50 and three-quarters of cases occur in men over 65 years. The largest number of cases is diagnosed in those aged 70-74. Currently, the growth rate of the older population is significantly higher than that of the total population. By 2025-2030, projections indicate that the population over 60 will be growing 3.5 times as rapidly as the total population. The proportion of older persons is projected to more than double worldwide over the next half century, which means that a further increase in incidence of diagnosed prostate cancer has to be expected. However, PSCA is not only a prostate cancer target. Rather, overexpression of PSCA has also been found in bladder cancer (Amara et al., Cancer Res 61 (2001): 4660-4665) and in pancreatic cancer (Argani et al., Cancer Res 61 (2001): 4320-4324). In light of the above, the PSCA×CD3 bispecific single chain antibody of the invention provides an advantageous tool in order to kill PSCA-expressing cancer cells of, including, but not limited to, prostate cancer, bladder cancer or pancreatic cancer in human. As shown in the following Examples, the cytotoxic activity of the PSCA×CD3 bispecific single chain antibody of the invention is higher than the cytotoxic activity of antibodies described in the art.

[0036] Advantageously, the present invention provides also PSCA×CD3 bispecific single chain antibodies comprising a second binding domain which binds both to the human PSCA and to the macaque PSCA homolog, i.e. the homolog of a non-chimpanzee primate. In a preferred embodiment, the bispecific single chain antibody thus comprises a second binding domain exhibiting cross-species specificity to the human and a non-chimpanzee primate Prostate stem cell antigen (PSCA). In this case, the identical bispecific single chain antibody molecule can be used both for preclinical evaluation of safety, activity and/or pharmacokinetic profile of these binding domains in primates and as drugs in humans. Put in other words, the same molecule can be used in preclinical animal studies as well as in clinical studies in humans. This leads to highly comparable results and a much-increased predictive power of the animal studies compared to species-specific surrogate molecules. Since both the CD3 and the PSCA binding domain of the PSCA×CD3 bispecific single chain antibody of the invention are cross-species specific, i.e. reactive with the human and non-chimpanzee primates, it can be used both for preclinical evaluation of safety, activity and/or pharmacokinetic profile of these binding domains in primates and—in the identical form—as drugs in humans.

[0037] CD19 is a cell surface molecule expressed only by B lymphocytes and follicular dendritic cells of the hematopoietic system. It is the earliest of the B-lineage-restricted antigens to be expressed and is present on most pre-B cells and most non-T-cell acute lymphocytic leukemia cells and B-cell type chronic lymphocytic leukemia cells.

[0038] In a preferred embodiment, the bispecific single chain antibody of the invention comprises a second binding domain exhibiting cross-species specificity to the human and a non-chimpanzee primate CD19. In this case, the identical bispecific single chain antibody molecule can be used both for preclinical evaluation of safety, activity and/or pharmacokinetic profile of these binding domains in primates and as drug in humans. This leads to highly comparable results and a much-increased predictive power of the animal studies compared to species-specific surrogate molecules. Since in this embodiment both the CD3 and the CD19 binding domain of the CD19×CD3 bispecific single chain antibody of the invention are cross-species specific, i.e. reactive with the human and non-chimpanzee primates, it can be used both for preclinical evaluation of safety, activity and/or pharmacokinetic profile of these binding domains in primates and—in the identical form—as drug in humans.

[0039] As described herein above, the MET oncogene, encoding the receptor tyrosin kinase (RTK) for hepatocyte growth factor (HGF), and Scatter Factor (SF), controls genetic programs leading to cell growth, invasion, and protection from apoptosis. As shown in the following Examples, the C-MET×CD3 bispecific single chain antibody of the invention thus provides an advantageous tool in order to kill C-MET-expressing cancer cells, as exemplified by the human C-MET positive breast cancer cell line MDA-MB-231. The cytotoxic activity of the C-MET×CD3 bispecific single chain antibody of the invention is higher than the cytotoxic activity of antibodies described in the art. Since preferably both the CD3 and the C-MET binding domain of the C-MET×CD3 bispecific single chain antibody of the invention are cross-species specific, i.e. reactive with the human and non-chimpanzee primates' antigens, the C-MET×CD3 bispecific single chain antibody of the invention can be used for preclinical evaluation of safety, activity and/or pharmacokinetic profile of these binding domains in primates and—in the identical form—as drugs in humans.

[0040] Advantageously, the present invention provides in a further alternative embodiment C-MET×CD3 bispecific single chain antibodies comprising a second binding domain which binds both to the human C-MET and to the macaque C-MET homolog, i.e. the homolog of a non-chimpanzee primate. In a preferred embodiment, the bispecific single chain antibody thus comprises a second binding domain exhibiting cross-species specificity to the human and a non-chimpanzee primate C-MET. In this case, the identical bispecific single chain antibody molecule can be used both for preclinical evaluation of safety, activity and/or pharmacokinetic profile of these binding domains in primates and as drugs in humans. Put in other words, the same molecule can be used in preclinical animal studies as well as in clinical studies in humans. This leads to highly comparable results and a much-increased predictive power of the animal studies compared to species-specific surrogate molecules. Since both the CD3 and the C-MET binding domain of the C-MET×CD3 bispecific single chain antibody of the invention are cross-species specific, i.e. reactive with the human and non-chimpanzee primates' antigens, it can be used both for preclinical evaluation of safety, activity and/or pharmacokinetic profile of these binding domains in primates and—in the identical form—as drugs in humans.

[0041] Angiogenesis, i.e. the formation of new capillaries, is essential to a number of important physiological events, both normal and pathological. Recently, increased attention has focused on the purification and characterization of inhibitors of this process, because of the potential therapeutic value of angiogenesis inhibitors in controlling solid tumors. Because of its restricted normal tissue distribution and abundant expression on tumor endothelial cells of many different types of solid tumors, Endosialin can be used as a target for antibody-based anti-angiogenic treatment strategies of cancer. In particular, targeting of tumor endothelial cells instead of the cancer cells has the advantage that target expression on the untransformed endothelial cells of tumor blood vessels is more stable than target expression on the genetically unstable cancer cells. The Endosialin×CD3 bispecific single chain antibody of the invention provides an advantageous tool in order to inhibit the formation of new capillaries in solid tumors which plays a major role in supporting the growth of the tumors. In this novel and inventive therapeutic approach, it is not the tumor cells which are targeted but tumor blood vessels. The Endosialin×CD3 bispecific single chain antibody of the invention recruits cytotoxic T cells to the Endosialin-positive endothelial cells in tumors, including, but not limited to, carcinomas (breast, kidney, lung, colorectal, colon, pancreas mesothelioma), sarcomas, and neuroectodermal tumors (melanoma, glioma, neuroblastoma), resulting in the depletion of the Endosialin-expressing endothelial cells from the tumor. In this way, tumor angegiogenesis is inhibited resulting in tumor regression or even depletion. As shown in the following Examples, the cytotoxic activity of the Endosialin×CD3 bispecific single chain antibody of the invention is higher than the activity of antibodies described in the art. Since the growth of solid neoplasms requires the recruitment of supporting blood vessels, the therapeutic use of the Endosialin×CD3 bispecific single chain antibody of the invention provides a novel and inventive approach for tumor endothelial targeting and killing.

[0042] Advantageously, the present invention provides also Endosialin×CD3 bispecific single chain antibodies comprising a second binding domain which binds both to the human Endosialin and to the macaque Endosialin homolog, i.e. the homolog of a non-chimpanzee primate. In a preferred embodiment, the bispecific single chain antibody thus comprises a second binding domain exhibiting cross-species specificity to the human and a non-chimpanzee primate Endosialin. In this case, the identical bispecific single chain antibody molecule can be used both for preclinical evaluation of safety, activity and/or pharmacokinetic profile of these binding domains in primates and as drug in humans. Put in other words, the same molecule can be used in preclinical animal studies as well as in clinical studies in humans. This leads to highly comparable results and a much-increased predictive power of the animal studies compared to species-specific surrogate molecules. Since both the CD3 and the Endosialin binding domain of the Endosialin×CD3 bispecific single chain antibody of the invention are cross-species specific, i.e. reactive with the human and non-chimpanzee primates, it can be used both for preclinical evaluation of safety, activity and/or pharmacokinetic profile of these binding domains in primates and—in the identical form—as drug in humans.

[0043] EpCAM has recently been found to be expressed on so called “cancer stem cells” (Dalerba et al., PNAS 104 (2007), 10158-63; Dalerba et al., Ann. Rev. Med. 58 (2007), 267-84). In light of this, the EpCAM×CD3 bispecific single chain antibody of the invention not only provides an advantageous tool in order to kill EpCAM-expressing cancer cells in epithelial cancer or minimal residual cancer, but may also be useful for the elimination of the presumed culprits responsible for tumor relapse after therapy. In addition, the cytotoxic activity of the EpCAM×CD3 bispecific single chain antibody of the invention is higher than the cytotoxic activity of antibodies described in the art.

[0044] In a preferred embodiment, the bispecific single chain antibody of the invention comprises a second binding domain exhibiting cross-species specificity to the human and a non-chimpanzee primate EpCAM. In this case, the identical bispecific single chain antibody molecule can be used both for preclinical evaluation of safety, activity and/or pharmacokinetic profile of these binding domains in primates and as drug in humans. This leads to highly comparable results and a much-increased predictive power of the animal studies compared to species-specific surrogate molecules. Since in this embodiment both the CD3 and the EpCAM binding domain of the EpCAM×CD3 bispecific single chain antibody of the invention are cross-species specific, i.e. reactive with the human and non-chimpanzee primates, it can be used both for preclinical evaluation of safety, activity and/or pharmacokinetic profile of these binding domains in primates and—in the identical form—as drug in humans.

[0045] The FAPalpha×CD3 bispecific single chain antibody of the invention provides an advantageous tool in order to attack the stroma of solid tumors, such as epithelial tumors, which plays a major role in supporting the growth and neovascularisation of tumors. In this novel and inventive therapeutic approach, it is not the tumor cells which are targeted but activated stromal fibroblasts. Previous study have shown that most of the common types of epithelial cancers, including more than 90% of primary and malignant breast, lung and colorectal carcinomas, contain abundant FAP alpha-reactive stromal fibroblasts (Scanlan et al., PNAS 91 (1994), 5657-5661 and references cited therein). In contrast, normal tissues and benign and premalignant epithelial lesions only rarely contain FAP alpha-positive stromal cells. The FAPalpha×CD3 bispecific single chain antibody of the invention recruits cytotoxic T cells to the FAP alpha-positive activated stromal fibroblasts in primary and malignant epithelial tumors resulting in the depletion of the stromal cells from the tumor. In particular, targeting of tumor stromal cells instead of the cancer cells has the advantage that target expression on the untransformed stromal cells is more stable than target expression on the genetically unstable cancer cells. As shown in the following Examples, the cytotoxic activity of the FAPalpha×CD3 bispecific single chain antibody of the invention is higher than the activity of antibodies described in the art. Since the growth of solid neoplasms requires the recruitment of a supporting stroma, the therapeutic use of the FAPalpha×CD3 bispecific single chain antibody of the invention provides a novel and inventive approach for tumor stromal targeting and killing.

[0046] Advantageously, the present invention provides also FAPalpha×CD3 bispecific single chain antibodies comprising a second binding domain which binds both to the human FAP alpha and to the macaque FAP alpha homolog, i.e. the homolog of a non-chimpanzee primate. In a preferred embodiment, the bispecific single chain antibody thus comprises a second binding domain exhibiting cross-species specificity to the human and a non-chimpanzee primate FAP alpha. In this case, the identical bispecific single chain antibody molecule can be used both for preclinical evaluation of safety, activity and/or pharmacokinetic profile of these binding domains in primates and as drugs in humans. Put in other words, the same molecule can be used in preclinical animal studies as well as in clinical studies in humans. This leads to highly comparable results and a much-increased predictive power of the animal studies compared to species-specific surrogate molecules. Since both the CD3 and the FAP alpha binding domain of the FAPalpha×CD3 bispecific single chain antibody of the invention are cross-species specific, i.e. reactive with the human and non-chimpanzee primates, it can be used both for preclinical evaluation of safety, activity and/or pharmacokinetic profile of these binding domains in primates and—in the identical form—as drugs in humans.

[0047] As described herein above, IGF-1R is a receptor (and, thus a cell surface antigen) with tyrosine kinase activity having 70% homology with the insulin receptor 1R. IGF-1R is expressed in a great variety of tumors and of tumor lines and the IGFs amplify the tumor growth via their attachment to IGF-1R.

[0048] In a preferred embodiment, the bispecific single chain antibody of the invention comprises a second binding domain exhibiting cross-species specificity to the human and a non-chimpanzee primate IGF-1R. In this case, the identical bispecific single chain antibody molecule can be used both for preclinical evaluation of safety, activity and/or pharmacokinetic profile of these binding domains in primates and as drug in humans. This leads to highly comparable results and a much-increased predictive power of the animal studies compared to species-specific surrogate molecules. Since in this embodiment both the CD3 and the IGF-1R binding domain of the IGF-1R×CD3 bispecific single chain antibody of the invention are cross-species specific, i.e. reactive with the human and non-chimpanzee primates, it can be used both for preclinical evaluation of safety, activity and/or pharmacokinetic profile of these binding domains in primates and—in the identical form—as drug in humans.

[0049] It has been found in the present invention that it is possible to generate a, preferably human, PSCA×CD3 (respectively CD19×CD3, C-MET×CD3, Endosialin×CD3, EpCAM×CD3, IGF-1R×CD3 or FAPα×CD3) bispecific single chain antibody wherein the identical molecule can be used in preclinical animal testing, as well as clinical studies and even in therapy in human. This is due to the unexpected identification of the, preferably human, PSCA×CD3 (respectively CD19×CD3, C-MET×CD3, Endosialin×CD3, EpCAM×CD3, IGF-1R×CD3 or FAPα×CD3) bispecific single chain antibody, which, in addition to binding to human CD3 epsilon and PSCA (respectively CD19, C-MET, Endosialin, EpCAM, IGF-1R or FAPα), respectively, (and due to genetic similarity likely to the chimpanzee counterpart), also binds to the homologs of said antigens of non-chimpanzee primates, including New-World Monkeys and Old-World Monkeys. As shown in the following Examples, said preferably human, PSCA×CD3 (respectively CD19×CD3, C-MET×CD3, Endosialin×CD3, EpCAM×CD3, IGF-1R×CD3 or FAPα×CD3) bispecific single chain antibody of the invention can be used as therapeutic agent or drug against various diseases, including, but not limited, to cancer.

[0050] The PSCA×CD3 bispecific single chain antibody is particularly advantageous for the therapy of prostate cancer, bladder cancer or pancreatic cancer.

[0051] Said preferably human CD19×CD3 bispecific single chain antibody of the invention can be used as therapeutic agent against various diseases, including but not limited to cancer, preferably B-cell malignancies, such as non-Hodgkin Lymphoma, B-cell mediated autoimmune diseases or the depletion of B-cells.

[0052] Said preferably human c-MET×CD3 bispecific single chain antibody of the invention can be used as therapeutic agent against various diseases, including but not limited to cancer, preferably carcinoma, sarcoma, glioblastoma/astrocytoma, melanoma, mesothelioma, Wilms tumor or a hematopoietic malignancy such as leukemia, lymphoma or multiple myeloma.

[0053] Said preferably human Endosialin×CD3 bispecific single chain antibody of the invention provides a novel and inventive approach for tumor endothelium targeting and killing for including (but not limited to) carcinomas (breast, kidney, lung, colorectal, colon, pancreas mesothelioma), sarcomas, and neuroectodermal tumors (melanoma, glioma, neuroblastoma). The Endosialin×CD3 bispecific single chain antibody of the invention can deprive solid tumors of their supporting blood vessels, thereby inhibiting angiogenesis and consequently the growth of said neoplasms.

[0054] Said preferably human EpCAM×CD3 bispecific single chain antibody of the invention can be used as therapeutic agent against various diseases, including but not limited to cancer, preferably epthelial cancer.

[0055] Said preferably human IGF-1R×CD3 bispecific single chain antibody of the invention can be used as therapeutic agent against various diseases, including but not limited to cancer, preferably bone or soft tissue cancer (e.g. Ewing sarcoma), breast, liver, lung, head and neck, colorectal, prostate, leiomyosarcoma, cervical and endometrial cancer, ovarian, prostate, and pancreatic cancer. IGF-1R×CD3 bispecific single chain antibody of the invention can be used as therapeutic agent against autoimmune diseases, preferably psoriasis.

[0056] In view of the above, the need to construct a surrogate PSCA×CD3 (respectively CD19×CD3, C-MET×CD3, Endosialin×CD3, EpCAM×CD3, IGF-1R×CD3 or FAPα×CD3) bispecific single chain antibody for testing in a phylogenetic distant (from humans) species disappears. As a result, the identical molecule can be used in animal preclinical testing as is intended to be administered to humans in clinical testing as well as following market approval and therapeutic drug administration. The ability to use the same molecule for preclinical animal testing as in later administration to humans virtually eliminates, or at least greatly reduces, the danger that the data obtained in preclinical animal testing have limited applicability to the human case. In short, obtaining preclinical safety data in animals using the same molecule as will actually be administered to humans does much to ensure the applicability of the data to a human-relevant scenario. In contrast, in conventional approaches using surrogate molecules, said surrogate molecules have to be molecularly adapted to the animal test system used for preclinical safety assessment. Thus, the molecule to be used in human therapy in fact differs in sequence and also likely in structure from the surrogate molecule used in preclinical testing in pharmacokinetic parameters and/or biological activity, with the consequence that data obtained in preclinical animal testing have limited applicability/transferability to the human case. The use of surrogate molecules requires the construction, production, purification and characterization of a completely new construct. This leads to additional development costs and time necessary to obtain that molecule. In sum, surrogates have to be developed separately in addition to the actual drug to be used in human therapy, so that two lines of development for two molecules have to be carried out. Therefore, a major advantage of the, preferably human, PSCA×CD3 (respectively CD19×CD3, C-MET×CD3, Endosialin×CD3, EpCAM×CD3, IGF-1R×CD3 or FAPα×CD3) bispecific single chain antibody of the invention exhibiting cross-species specificity described herein is that the identical molecule can be used for therapeutics in humans and in preclinical animal testing.

[0057] It is preferred that at least one of said first or second binding domains of the bispecific single chain antibody of the invention is CDR-grafted, humanized or human, as set forth in more detail below. Preferably, both the first and second binding domains of the bispecific single chain antibody of the invention are CDR-grafted, humanized or human. For the preferably human, PSCA×CD3 (respectively CD19×CD3, C-MET×CD3, Endosialin×CD3, EpCAM×CD3, IGF-1R×CD3 or FAPα×CD3) bispecific single chain antibody of the invention, the generation of an immune reaction against said binding molecules is excluded to the maximum possible extent upon administration of the molecule to human patients.

[0058] Another major advantage of the, preferably human, PSCA×CD3 (respectively CD19×CD3, C-MET×CD3, Endosialin×CD3, EpCAM×CD3, IGF-1R×CD3 or FAPα×CD3) bispecific single chain antibody of the invention is its applicability for preclinical testing in various primates. The behavior of a drug candidate in animals should ideally be indicative of the expected behavior of this drug candidate upon administration to humans. As a result, the data obtained from such preclinical testing should therefore generally have a highly predictive power for the human case. However, as learned from the tragic outcome of the recent Phase I clinical trial on TGN1412 (a CD28 monoclonal antibody), a drug candidate may act differently in a primate species than in humans: Whereas in preclinical testing of said antibody no or only limited adverse effects have been observed in animal studies performed with cynomolgus monkeys, six human patients developed multiple organ failure upon administration of said antibody (Lancet 368 (2006), 2206-7). The results of these dramatic, non-desired negative events suggest that it may not be sufficient to limit preclinical testing to only one (non-chimpanzee primate) species. The fact that the PSCA×CD3 (respectively CD19×CD3, C-MET×CD3, Endosialin×CD3, EpCAM×CD3, IGF-1R×CD3 or FAPα×CD3) bispecific single chain antibody of the invention binds to a series of New-World and Old-World Monkeys may help to overcome the problems faced in the case mentioned above. Accordingly, the present invention provides means and methods for minimizing species differences in effects when drugs for human therapy are being developed and tested.

[0059] With the, preferably human, cross-species specific PSCA×CD3 (respectively CD19×CD3, C-MET×CD3, Endosialin×CD3, EpCAM×CD3, IGF-1R×CD3 or FAPα×CD3) bispecific single chain antibody of the invention it is also no longer necessary to adapt the test animal to the drug candidate intended for administration to humans, such as e.g. the creation of transgenic animals. The, preferably human, PSCA×CD3 (respectively CD19×CD3, C-MET×CD3, Endosialin×CD3, EpCAM×CD3, IGF-1R×CD3 or FAPα×CD3) bispecific single chain antibody of the invention exhibiting cross-species specificity according to the uses and the methods of invention can be directly used for preclinical testing in non-chimpanzee primates, without any genetic manipulation of the animals. As well known to those skilled in the art, approaches in which the test animal is adapted to the drug candidate always bear the risk that the results obtained in the preclinical safety testing are less representative and predictive for humans due to the modification of the animal. For example, in transgenic animals, the proteins encoded by the transgenes are often highly over-expressed. Thus, data obtained for the biological activity of an antibody against this protein antigen may be limited in their predictive value for humans in which the protein is expressed at much lower, more physiological levels.

[0060] A further advantage of the uses of the preferably human PSCA×CD3 (respectively CD19×CD3, C-MET×CD3, Endosialin×CD3, EpCAM×CD3, IGF-1R×CD3 or FAPα×CD3) bispecific single chain antibody of the invention exhibiting cross-species specificity is the fact that chimpanzees as an endangered species are avoided for animal testing. Chimpanzees are the closest relatives to humans and were recently grouped into the family of hominids based on the genome sequencing data (Wildman et al., PNAS 100 (2003), 7181). Therefore, data obtained with chimpanzee is generally considered to be highly predictive for humans. However, due to their status as endangered species, the number of chimpanzees, which can be used for medical experiments, is highly restricted. As stated above, maintenance of chimpanzees for animal testing is therefore both costly and ethically problematic. The uses of the, preferably human, PSCA×CD3 (respectively CD19×CD3, C-MET×CD3, Endosialin×CD3, EpCAM×CD3, IGF-1R×CD3 or FAPα×CD3) bispecific single chain antibody of the invention avoid both ethical objections and financial burden during preclinical testing without prejudicing the quality, i.e. applicability, of the animal testing data obtained. In light of this, the uses of the, preferably human, PSCA×CD3 (respectively CD19×CD3, C-MET×CD3, Endosialin×CD3, EpCAM×CD3, IGF-1R×CD3 or FAPα×CD3) bispecific single chain antibody of the invention provide for a reasonable alternative for studies in chimpanzees.

[0061] A still further advantage of the, preferably human, PSCA×CD3 (respectively CD19×CD3, C-MET×CD3, Endosialin×CD3, EpCAM×CD3, IGF-1R×CD3 or FAPα×CD3) bispecific single chain antibody of the invention is the ability of extracting multiple blood samples when using it as part of animal preclinical testing, for example in the course of pharmacokinetic animal studies. Multiple blood extractions can be much more readily obtained with a non-chimpanzee primate than with lower animals, e.g. a mouse. The extraction of multiple blood samples allows continuous testing of blood parameters for the determination of the biological effects induced by the, preferably human, PSCA×CD3 (respectively CD19×CD3, C-MET×CD3, Endosialin×CD3, EpCAM×CD3, IGF-1R×CD3 or FAPα×CD3) bispecific single chain antibody of the invention. Furthermore, the extraction of multiple blood samples enables the researcher to evaluate the pharmacokinetic profile of the, preferably human, PSCA×CD3 (respectively CD19×CD3, C-MET×CD3, Endosialin×CD3, EpCAM×CD3, IGF-1R×CD3 or FAPα×CD3) bispecific single chain antibody of the invention as defined herein. In addition, potential side effects, which may be induced by said, preferably human, PSCA×CD3 (respectively CD19×CD3, C-MET×CD3, Endosialin×CD3, EpCAM×CD3, IGF-1R×CD3 or FAPα×CD3) bispecific single chain antibody of the invention reflected in blood parameters can be measured in different blood samples extracted during the course of the administration of said antibody. This allows the determination of the potential toxicity profile of the, preferably human, PSCA×CD3 (respectively CD19×CD3, C-MET×CD3, Endosialin×CD3, EpCAM×CD3, IGF-1R×CD3 or FAPα×CD3) bispecific single chain antibody of the invention as defined herein.

[0062] The advantages of the, preferably human, PSCA×CD3 (respectively CD19×CD3, C-MET×CD3, Endosialin×CD3, EpCAM×CD3, IGF-1R×CD3 or FAPα×CD3) bispecific single chain antibody of the invention as defined herein exhibiting cross-species specificity may be briefly summarized as follows:

[0063] First, the, preferably human, PSCA×CD3 (respectively CD19×CD3, C-MET×CD3, Endosialin×CD3, EpCAM×CD3, IGF-1R×CD3 or FAPα×CD3) bispecific single chain antibody of the invention as defined herein used in preclinical testing is the same as the one used in human therapy. Thus, it is no longer necessary to develop two independent molecules, which may differ in their pharmacokinetic properties and biological activity. This is highly advantageous in that e.g. the pharmacokinetic results are more directly transferable and applicable to the human setting than e.g. in conventional surrogate approaches.

[0064] Second, the uses of the, preferably human, PSCA×CD3 (respectively CD19×CD3, C-MET×CD3, Endosialin×CD3, EpCAM×CD3, IGF-1R×CD3 or FAPα×CD3) bispecific single chain antibody of the invention as defined herein for the preparation of therapeutics in human is less cost- and labor-intensive than surrogate approaches.

[0065] Third, the, preferably human, PSCA×CD3 (respectively CD19×CD3, C-MET×CD3, Endosialin×CD3, EpCAM×CD3, IGF-1R×CD3 or FAPα×CD3) bispecific single chain antibody of the invention as defined herein can be used for preclinical testing not only in one primate species, but in a series of different primate species, thereby limiting the risk of potential species differences between primates and human.

[0066] Fourth, chimpanzee as an endangered species for animal testing can be avoided if desired.

[0067] Fifth, multiple blood samples can be extracted for extensive pharmacokinetic studies. Sixth, due to the human origin of the, preferably human, binding molecules according to a preferred embodiment of the invention the generation of an immune reaction against said binding molecules is minimalized when administered to human patients. Induction of an immune response with antibodies specific for a drug candidate derived from a non-human species as e.g. a mouse leading to the development of human-anti-mouse antibodies (HAMAs) against therapeutic molecules of murine origin is excluded.

[0068] Last but not least:
[0069] the therapeutic use of the PSCA×CD3 bispecific single chain antibody of the invention provides a novel and inventive therapeutic approach for cancer, including, but not limited to, prostate cancer, bladder cancer or pancreatic cancer. The following examples clearly demonstrate for each construct the potent recruitment of cytotoxic activity of human and macaque effector cells against cells positive for PSCA.
[0070] the therapeutic use of the CD19×CD3 bispecific single chain antibody of the invention provides a novel and inventive therapeutic approach for cancer, preferably B-cell malignancies, such as non-Hodgkin lymphoma, B-cell mediated autoimmune diseases or the depletion of B-cells. As shown in the following Examples, the cytotoxic activity of the CD19×CD3 bispecific single chain antibody of the invention is higher than the activity of antibodies described in the art.
[0071] the therapeutic use of the C-MET×CD3 bispecific single chain antibody of the invention provides a novel and inventive therapeutic approach for cancer, preferably carcinoma, sarcoma, glioblastoma/astrocytoma, melanoma, mesothelioma, Wilms tumor or a hematopoietic malignancy such as leukemia, lymphoma or multiple myeloma. As shown in the following Examples, the cytotoxic activity of the C-MET×CD3 bispecific single chain antibody of the invention is higher than the activity of antibodies described in the art.
[0072] the therapeutic use of the Endosialin×CD3 bispecific single chain antibody of the invention provides a novel and inventive approach for tumor endothelium targeting and killing for including (but not limited to) carcinomas (breast, kidney, lung, colorectal, colon, pancreas mesothelioma), sarcomas, and neuroectodermal tumors (melanoma, glioma, neuroblastoma). The Endosialin×CD3 bispecific single chain antibody of the invention can deprive solid tumors of their supporting blood vessels, thereby inhibiting angiogenesis and consequently the growth of said neoplasms.
[0073] the therapeutic use of the EpCAM×CD3 bispecific single chain antibody of the invention provides a novel and inventive therapeutic approach for cancer, preferably epithelial cancer and/or a minimal residual cancer. The EpCAM×CD3 bispecific single chain antibody of the invention not only provides an advantageous tool in order to kill EpCAM-expressing cancer cells in cancer, preferably epithelial cancer or a minimal residual cancer, but may also be useful for the elimination of the presumed culprits responsible for tumor relapse after therapy. In addition, the cytotoxic activity of the EpCAM×CD3 bispecific single chain antibody of the invention is higher than the cytotoxic activity of antibodies described in the art.
[0074] the therapeutic use of the FAPalpha×CD3 bispecific single chain antibody of the invention provides a novel and inventive approach for tumor stromal targeting and killing: The FAPalpha×CD3 bispecific single chain antibody of the invention deprives solid tumors, such as epithelial tumors, of their supporting stroma, thereby inhibiting the growth and neovascularisation of solid neoplasms.
[0075] the therapeutic use of the IGF-1R×CD3 bispecific single chain antibody of the invention provides a novel and inventive approach for cancer (preferably bone or soft tissue cancer (e.g. Ewing sarcoma), breast, liver, lung, head and neck, colorectal, prostate, leiomyosarcoma, cervical and endometrial cancer, ovarian, prostate, and pancreatic cancer) or autoimmune diseases (preferably psoriasis).

[0076] As noted herein above, the present invention provides polypeptides, i.e. bispecific single chain antibodies, comprising a first binding domain capable of binding to an epitope of human and non-chimpanzee primate CD3ε chain and a second binding domain capable of binding to PSCA (respectively CD19, C-MET, Endosialin, EpCAM, IGF-1R or FAPα), wherein the second binding domain preferably also binds to PSCA (respectively CD19, C-MET, Endosialin, EpCAM, IGF-1R or FAPα) of a human and a non-chimpanzee primate. The advantage of bispecific single chain antibody molecules as drug candidates fulfilling the requirements of the preferred bispecific single chain antibody of the invention is the use of such molecules in preclinical animal testing as well as in clinical studies and even for therapy in human. In a preferred embodiment of the cross-species specific bispecific single chain antibodies of the invention the second binding domain binding to a cell surface antigen is human. In a cross-species specific bispecific molecule according to the invention the binding domain binding to an epitope of human and non-chimpanzee primate CD3 epsilon chain is located in the order VH-VL or VL-VH at the N-terminus or the C-terminus of the bispecific molecule. Examples for cross-species specific bispecific molecules according to the invention in different arrangements of the VH- and the VL-chain in the first and the second binding domain are described in the appended examples.

[0077] As used herein, a “bispecific single chain antibody” denotes a single polypeptide chain comprising two binding domains. Each binding domain comprises one variable region from an antibody heavy chain (“VH region”), wherein the VH region of the first binding domain specifically binds to the CD3ε molecule, and the VH region of the second binding domain specifically binds to PSCA, CD19, C-MET, Endosialin, EpCAM, IGF-1R or FAPα. The two binding domains are optionally linked to one another by a short polypeptide spacer. A non-limiting example for a polypeptide spacer is Gly-Gly-Gly-Gly-Ser (G-G-G-G-S) and repeats thereof. Each binding domain may additionally comprise one variable region from an antibody light chain (“VL region”), the VH region and VL region within each of the first and second binding domains being linked to one another via a polypeptide linker, for example of the type disclosed and claimed in EP 623679 B1, but in any case long enough to allow the VH region and VL region of the first binding domain and the VH region and VL region of the second binding domain to pair with one another such that, together, they are able to specifically bind to the respective first and second binding domains.

[0078] The term “protein” is well known in the art and describes biological compounds. Proteins comprise one or more amino acid chains (polypeptides), whereby the amino acids are bound among one another via a peptide bond. The term “polypeptide” as used herein describes a group of molecules, which consists of more than 30 amino acids. In accordance with the invention, the group of polypeptides comprises “proteins” as long as the proteins consist of a single polypeptide chain. Also in line with the definition the term “polypeptide” describes fragments of proteins as long as these fragments consist of more than 30 amino acids. Polypeptides may further form multimers such as dimers, trimers and higher oligomers, i.e. consisting of more than one polypeptide molecule. Polypeptide molecules forming such dimers, trimers etc. may be identical or non-identical. The corresponding higher order structures of such multimers are, consequently, termed homo- or heterodimers, homo- or heterotrimers etc. An example for a hereteromultimer is an antibody molecule, which, in its naturally occurring form, consists of two identical light polypeptide chains and two identical heavy polypeptide chains. The terms “polypeptide” and “protein” also refer to naturally modified polypeptides/proteins wherein the modification is effected e.g. by post-translational modifications like glycosylation, acetylation, phosphorylation and the like. Such modifications are well known in the art.

[0079] The term “binding domain” characterizes in connection with the present invention a domain of a polypeptide which specifically binds to/interacts with a given target structure/antigen/epitope. Thus, the binding domain is an “antigen-interaction-site”. The term “antigen-interaction-site” defines, in accordance with the present invention, a motif of a polypeptide, which is able to specifically interact with a specific antigen or a specific group of antigens, e.g. the identical antigen in different species. Said binding/interaction is also understood to define a “specific recognition”. The term “specifically recognizing” means in accordance with this invention that the antibody molecule is capable of specifically interacting with and/or binding to at least two, preferably at least three, more preferably at least four amino acids of an antigen, e.g. the human CD3 antigen as defined herein. Such binding may be exemplified by the specificity of a “lock-and-key-principle”. Thus, specific motifs in the amino acid sequence of the binding domain and the antigen bind to each other as a result of their primary, secondary or tertiary structure as well as the result of secondary modifications of said structure. The specific interaction of the antigen-interaction-site with its specific antigen may result as well in a simple binding of said site to the antigen. Moreover, the specific interaction of the binding domain/antigen-interaction-site with its specific antigen may alternatively result in the initiation of a signal, e.g. due to the induction of a change of the conformation of the antigen, an oligomerization of the antigen, etc. A preferred example of a binding domain in line with the present invention is an antibody. The binding domain may be a monoclonal or polyclonal antibody or derived from a monoclonal or polyclonal antibody.

[0080] The term “antibody” comprises derivatives or functional fragments thereof which still retain the binding specificity. Techniques for the production of antibodies are well known in the art and described, e.g. in Harlow and Lane “Antibodies, A Laboratory Manual”, Cold Spring Harbor Laboratory Press, 1988 and Harlow and Lane “Using Antibodies: A Laboratory Manual” Cold Spring Harbor Laboratory Press, 1999. The term “antibody” also comprises immunoglobulins (Ig's) of different classes (i.e. IgA, IgG, IgM, IgD and IgE) and subclasses (such as IgG1, IgG2 etc.).

[0081] The definition of the term “antibody” also includes embodiments such as chimeric, single chain and humanized antibodies, as well as antibody fragments, like, inter alia, Fab fragments. Antibody fragments or derivatives further comprise F(ab′)₂, Fv, scFv fragments or single domain antibodies, single variable domain antibodies or immunoglobulin single variable domain comprising merely one variable domain, which might be VH or VL, that specifically bind to an antigen or epitope independently of other V regions or domains; see, for example, Harlow and Lane (1988) and (1999), loc. cit. Such immunoglobulin single variable domain encompasses not only an isolated antibody single variable domain polypeptide, but also larger polypeptides that comprise one or more monomers of an antibody single variable domain polypeptide sequence.

[0082] Various procedures are known in the art and may be used for the production of such antibodies and/or fragments. Thus, the (antibody) derivatives can also be produced by peptidomimetics. Further, techniques described for the production of single chain antibodies (see, inter alia, U.S. Pat. No. 4,946,778) can be adapted to produce single chain antibodies specific for elected polypeptide(s). Also, transgenic animals may be used to express humanized antibodies specific for polypeptides and fusion proteins of this invention. For the preparation of monoclonal antibodies, any technique, providing antibodies produced by continuous cell line cultures can be used.

[0083] Examples for such techniques include the hybridoma technique (Köhler and Milstein Nature 256 (1975), 495-497), the trioma technique, the human B-cell hybridoma technique (Kozbor, Immunology Today 4 (1983), 72) and the EBV-hybridoma technique to produce human monoclonal antibodies (Cole et al., Monoclonal Antibodies and Cancer Therapy, Alan R. Liss, Inc. (1985), 77-96). Surface plasmon resonance as employed in the BIAcore system can be used to increase the efficiency of phage antibodies which bind to an epitope of a target polypeptide, such as CD3 epsilon, PSCA, CD19, C-MET, Endosialin, EpCAM, IGF-1R or FAPα (Schier, Human Antibodies Hybridomas 7 (1996), 97-105; Malmborg, J. Immunol. Methods 183 (1995), 7-13). It is also envisaged in the context of this invention that the term “antibody” comprises antibody constructs, which may be expressed in a host as described herein below, e.g. antibody constructs which may be transfected and/or transduced via, inter alia, viruses or plasmid vectors.

[0084] The term “specific interaction” as used in accordance with the present invention means that the binding domain does not or does not significantly cross-react with polypeptides which have similar structure as those bound by the binding domain, and which might be expressed by the same cells as the polypeptide of interest. Cross-reactivity of a panel of binding domains under investigation may be tested, for example, by assessing binding of said panel of binding domains under conventional conditions (see, e.g., Harlow and Lane, Antibodies: A Laboratory Manual, Cold Spring Harbor Laboratory Press, 1988 and Using Antibodies: A Laboratory Manual, Cold Spring Harbor Laboratory Press, 1999). Examples for the specific interaction of a binding domain with a specific antigen comprise the specificity of a ligand for its receptor. Said definition particularly comprises the interaction of ligands, which induce a signal upon binding to its specific receptor. Examples for said interaction, which is also particularly comprised by said definition, is the interaction of an antigenic determinant (epitope) with the binding domain (antigenic binding site) of an antibody.

[0085] The term “cross-species specificity” or “interspecies specificity” as used herein means binding of a binding domain described herein to the same target molecule in humans and non-chimpanzee primates. Thus, “cross-species specificity” or “interspecies specificity” is to be understood as an interspecies reactivity to the same molecule “X” (i.e. the homolog) expressed in different species, but not to a molecule other than “X”. Cross-species specificity of a monoclonal antibody recognizing e.g. human CD3 epsilon, to a non-chimpanzee primate CD3 epsilon, e.g. macaque CD3 epsilon, can be determined, for instance, by FACS analysis. The FACS analysis is carried out in a way that the respective monoclonal antibody is tested for binding to human and non-chimpanzee primate cells, e.g. macaque cells, expressing said human and non-chimpanzee primate CD3 epsilon antigens, respectively. An appropriate assay is shown in the following examples. The above-mentioned subject matter applies mutatis mutandis for the PSCA, CD19, C-MET, Endosialin, EpCAM, IGF-1R and FAPα antigen: Cross-species specificity of a monoclonal antibody recognizing e.g. human PSCA, CD19, C-MET, Endosialin, EpCAM, IGF-1R or FAPα, to a non-chimpanzee primate PSCA, CD19, C-MET, Endosialin, EpCAM, IGF-1R or FAPα, e.g. macaque PSCA, CD19, C-MET, Endosialin, EpCAM, IGF-1R or FAPα, can be determined, for instance, by FACS analysis. The FACS analysis is carried out in a way that the respective monoclonal antibody is tested for binding to human and non-chimpanzee primate cells, e.g. macaque cells, expressing said human and non-chimpanzee primate PSCA, CD19, C-MET, Endosialin, EpCAM, IGF-1R or FAPα antigens, respectively.

[0086] As used herein, CD3 epsilon denotes a molecule expressed as part of the T cell receptor and has the meaning as typically ascribed to it in the prior art. In human, it encompasses in individual or independently combined form all known CD3 subunits, for example CD3 epsilon, CD3 delta, CD3 gamma, CD3 zeta, CD3 alpha and CD3 beta. The non-chimpanzee primate, non-human CD3 antigens as referred to herein are, for example, Macaca fascicularis CD3 and Macaca mulatta CD3. In Macaca fascicularis, it encompasses CD3 epsilon FN-18 negative and CD3 epsilon FN-18 positive, CD3 gamma and CD3 delta. In Macaca mulatta, it encompasses CD3 epsilon, CD3 gamma and CD3 delta. Preferably, said CD3 as used herein is CD3 epsilon.

[0087] The human CD3 epsilon is indicated in GenBank Accession No.NM_000733 and comprises SEQ ID NO. 1. The human CD3 gamma is indicated in GenBank Accession NO. NM_000073. The human CD3 delta is indicated in GenBank Accession No. NM_000732.

[0088] The CD3 epsilon “FN-18 negative” of Macaca fascicularis (i.e. CD3 epsilon not recognized by monoclonal antibody FN-18 due to a polymorphism as set forth above) is indicated in GenBank Accession No. AB073994.

[0089] The CD3 epsilon “FN-18 positive” of Macaca fascicularis (i.e. CD3 epsilon recognized by monoclonal antibody FN-18) is indicated in GenBank Accession No. AB073993. The CD3 gamma of Macaca fascicularis is indicated in GenBank Accession No. AB073992. The CD3 delta of Macaca fascicularis is indicated in GenBank Accession No. AB073991.

[0090] The nucleic acid sequences and amino acid sequences of the respective CD3 epsilon, gamma and delta homologs of Macaca mulatta can be identified and isolated by recombinant techniques described in the art (Sambrook et al. Molecular Cloning: A Laboratory Manual; Cold Spring Harbor Laboratory Press, 3^{rd} edition 2001). This applies mutatis mutandis to the CD3 epsilon, gamma and delta homologs of other non-chimpanzee primates as defined herein. The identification of the amino acid sequence of Callithrix jacchus, Saimiri sciureus and Saguinus oedipus is described in the appended examples. The amino acid sequence of the extracellular domain of the CD3 epsilon of Callithrix jacchus is depicted in SEQ ID NO: 3, the one of Saguinus oedipus is depicted in SEQ ID NO: 5 and the one of Saimiri sciureus is depicted in SEQ ID NO: 7.

[0091] The human PSCA is indicated in GenBank Accession No. NM_005672. The corresponding cDNA and amino acid sequences are shown in SEQ ID NOs. 444 and 443, respectively. The cloning of the PSCA homolog of macaque is demonstrated in the following examples, the corresponding cDNA and amino acid sequences are shown in SEQ ID NOs. 446 and 445, respectively.

[0092] The human CD19 is indicated in GenBank Accession No. NM 001770. On the basis of this sequence information it is possible for the person skilled in the art without any inventive ado to clone (and express) the macaque CD19 molecule. For example, the human CD19 cDNA or a fragment thereof indicated in GenBank Accession No. NM_001770 can be used as a hybridization probe in order to screen a macaque cDNA library (e.g. a cDNA library of Cynomolgus monkey or Rhesus monkey) under appropriate hybridization conditions. Recombinant techniques and screening methods (including hybridization approaches) in molecular biology are described e.g. in Sambrook et al. Molecular Cloning: A Laboratory Manual; Cold Spring Harbor Laboratory Press, 3^{rd} edition 2001.

[0093] The human C-MET is indicated in GenBank Accession No. NM 000245. The corresponding cDNA and amino acid sequences are shown in SEQ ID NOs. 776 and 777, respectively. The cloning of the C-MET homolog of macaque is demonstrated in the following examples, the corresponding cDNA and amino acid sequences are shown in SEQ ID NOs. 788 and 789, respectively.

[0094] The human Endosialin is indicated in GenBank Accession No. NM 020404. The corresponding cDNA and amino acid sequences are shown in SEQ ID NOs. 913 and 914, respectively. The cloning of the Endosialin homolog of macaque is demonstrated in the following examples, the corresponding cDNA and amino acid sequences are shown in SEQ ID NOs. 915 and 916, respectively.

[0095] The human EpCAM is indicated in GenBank Accession No. NM_002354. The corresponding cDNA and amino acid sequences are shown in SEQ ID NOs. 1029 and 1028, respectively. As demonstrated in the following examples, the second binding domain of the EpCAM×CD3 bispecific single chain antibody of the invention binds to an epitope localized in amino acid residues 26 to 61 of the EGF-like domain 1 of EpCAM which is encoded by Exon 2 of the EpCAM gene. Said amino acids residues 26 to 61 of the EGF-like domain 1 of human EpCAM are shown in SEQ ID NO. 1130. On the basis of this sequence information it is possible for the person skilled in the art without any inventive ado to clone (and express) the macaque EpCAM molecule. For example, the human EpCAM cDNA or a fragment thereof indicated in GenBank Accession No. NM_002354 can be used as a hybridization probe in order to screen a macaque cDNA library (e.g. a cDNA library of Cynomolgus monkey or Rhesus monkey) under appropriate hybridization conditions. Recombinant techniques and screening methods (including hybridization approaches) in molecular biology are described e.g. in Sambrook et al. Molecular Cloning: A Laboratory Manual; Cold Spring Harbor Laboratory Press, 3^{rd} edition 2001.

[0096] The human FAP alpha is indicated in GenBank Accession No. NM_004460. The corresponding cDNA and amino acid sequences are shown in SEQ ID NOs. 1149 and 1150, respectively. The cloning of the FAP alpha homolog of macaque is demonstrated in the following examples, the corresponding cDNA and amino acid sequences are shown in SEQ ID NOs. 1151 and 1152, respectively.

[0097] The human IGF-1R is indicated in GenBank Accession No. NM 000875. The corresponding cDNA and amino acid sequences are shown in SEQ ID NOs. 1988 and 1989, respectively. The coding sequence of macaque IGF-1R as published in GenBank (Accession number XM_001100407). The corresponding cDNA and amino acid sequences are shown in SEQ ID NOs. 1998 and 1999, respectively.

[0098] In line with the above, the term “epitope” defines an antigenic determinant, which is specifically bound/identified by a binding domain as defined herein. The binding domain may specifically bind to/interact with conformational or continuous epitopes, which are unique for the target structure, e.g. the human and non-chimpanzee primate CD3 epsilon chain or the human and non-chimpanzee primate PSCA, CD19, C-MET, Endosialin, EpCAM, IGF-1R or FAPα. A conformational or discontinuous epitope is characterized for polypeptide antigens by the presence of two or more discrete amino acid residues which are separated in the primary sequence, but come together on the surface of the molecule when the polypeptide folds into the native protein/antigen (Sela, (1969) Science 166, 1365 and Laver, (1990) Cell 61, 553-6). The two or more discrete amino acid residues contributing to the epitope are present on separate sections of one or more polypeptide chain(s). These residues come together on the surface of the molecule when the polypeptide chain(s) fold(s) into a three-dimensional structure to constitute the epitope. In contrast, a continuous or linear epitope consists of two or more discrete amino acid residues, which are present in a single linear segment of a polypeptide chain. Within the present invention, a “context-dependent” CD3 epitope refers to the conformation of said epitope. Such a context-dependent epitope, localized on the epsilon chain of CD3, can only develop its correct conformation if it is embedded within the rest of the epsilon chain and held in the right position by heterodimerization of the epsilon chain with either CD3 gamma or delta chain. In contrast, a context-independent CD3 epitope as provided herein refers to an N-terminal 1-27 amino acid residue polypeptide or a functional fragment thereof of CD3 epsilon. This N-terminal 1-27 amino acid residue polypeptide or a functional fragment thereof maintains its three-dimensional structural integrity and correct conformation when taken out of its native environment in the CD3 complex. The context-independency of the N-terminal 1-27 amino acid residue polypeptide or a functional fragment thereof, which is part of the extracellular domain of CD3 epsilon, represents, thus, an epitope which is completely different to the epitopes of CD3 epsilon described in connection with a method for the preparation of human binding molecules in WO 2004/106380. Said method used solely expressed recombinant CD3 epsilon. The conformation of this solely expressed recombinant CD3 epsilon differed from that adopted in its natural form, that is, the form in which the CD3 epsilon subunit of the TCR/CD3 complex exists as part of a noncovalent complex with either the CD3 delta or the CD3-gamma subunit of the TCR/CD3 complex. When such solely expressed recombinant CD3 epsilon protein is used as an antigen for selection of antibodies from an antibody library, antibodies specific for this antigen are identified from the library although such a library does not contain antibodies with specificity for self-antigens/autoantigens. This is due to the fact that solely expressed recombinant CD3 epsilon protein does not exist in vivo; it is not an autoantigen. Consequently, subpopulations of B cells expressing antibodies specific for this protein have not been depleted in vivo; an antibody library constructed from such B cells would contain genetic material for antibodies specific for solely expressed recombinant CD3 epsilon protein.

[0099] However, since the context-independent N-terminal 1-27 amino acid residue polypeptide or a functional fragment thereof is an epitope, which folds in its native form, binding domains in line with the present invention cannot be identified by methods based on the approach described in WO 2004/106380. Therefore, it could be verified in tests that binding molecules as disclosed in WO 2004/106380 are not capable of binding to the N-terminal 1-27 amino acid residues of the CD3 epsilon chain. Hence, conventional anti-CD3 binding molecules or anti-CD3 antibody molecules (e.g. as disclosed in WO 99/54440) bind CD3 epsilon chain at a position which is more C-terminally located than the context-independent N-terminal 1-27 amino acid residue polypeptide or a functional fragment provided herein. Prior art antibody molecules OKT3 and UCHT-1 have also a specificity for the epsilon-subunit of the TCR/CD3 complex between amino acid residues 35 to 85 and, accordingly, the epitope of these antibodies is also more C-terminally located. In addition, UCHT-1 binds to the CD3 epsilon chain in a region between amino acid residues 43 to 77 (Tunnacliffe, Int. Immunol. 1 (1989), 546-50; Kjer-Nielsen, PNAS 101, (2004), 7675-7680; Salmeron, J. Immunol. 147 (1991), 3047-52). Therefore, prior art anti-CD3 molecules do not bind to and are not directed against the herein defined context-independent N-terminal 1-27 amino acid residue epitope (or a functional fragment thereof). In particular, the state of the art fails to provide anti-CD3 molecules which specifically binds to the context-independent N-terminal 1-27 amino acid residue epitope and which are cross-species specific, i.e. bind to human and non-chimpanzee primate CD3 epsilon.

[0100] For the generation of a, preferably human, binding domain comprised in a bispecific single chain antibody molecule of the invention, e.g. monoclonal antibodies binding to both the human and non-chimpanzee primate CD3 epsilon (e.g. macaque CD3 epsilon) or monoclonal antibodies binding to the human and/or non-chimpanzee primate PSCA, respectively CD19, C-MET, Endosialin, EpCAM, IGF-1R or FAPα, can be used.

[0101] As used herein, “human” and “man” refers to the species Homo sapiens. As far as the medical uses of the constructs described herein are concerned, human patients are to be treated with the same molecule.

[0102] It is preferred that at least one of said first or second binding domains of the bispecific single chain antibody of the invention is CDR-grafted, humanized or human. Preferably, both the first and second binding domains of the bispecific single chain antibody of the invention are CDR-grafted, humanized or human.

[0103] The term “human” antibody as used herein is to be understood as meaning that the bispecific single chain antibody as defined herein, comprises (an) amino acid sequence(s) contained in the human germline antibody repertoire. For the purposes of definition herein, said bispecific single chain antibody may therefore be considered human if it consists of such (a) human germline amino acid sequence(s), i.e. if the amino acid sequence(s) of the bispecific single chain antibody in question is (are) identical to (an) expressed human germline amino acid sequence(s). A bispecific single chain antibody as defined herein may also be regarded as human if it consists of (a) sequence(s) that deviate(s) from its (their) closest human germline sequence(s) by no more than would be expected due to the imprint of somatic hypermutation. Additionally, the antibodies of many non-human mammals, for example rodents such as mice and rats, comprise VH CDR3 amino acid sequences which one may expect to exist in the expressed human antibody repertoire as well. Any such sequence(s) of human or non-human origin which may be expected to exist in the expressed human repertoire would also be considered “human” for the purposes of the present invention.

[0104] As used herein, the term “humanized”, “humanization”, “human-like” or grammatically related variants thereof are used interchangeably to refer to a bispecific single chain antibody comprising in at least one of its binding domains at least one complementarity determining region (“CDR”) from a non-human antibody or fragment thereof. Humanization approaches are described for example in WO 91/09968 and U.S. Pat. No. 6,407,213. As non-limiting examples, the term encompasses the case in which a variable region of at least one binding domain comprises a single CDR region, for example the third CDR region of the VH (CDRH3), from another non-human animal, for example a rodent, as well as the case in which a or both variable region/s comprise at each of their respective first, second and third CDRs the CDRs from said non-human animal. In the event that all CDRs of a binding domain of the bispecific single chain antibody have been replaced by their corresponding equivalents from, for example, a rodent, one typically speaks of “CDR-grafting”, and this term is to be understood as being encompassed by the term “humanized” or grammatically related variants thereof as used herein. The term “humanized” or grammatically related variants thereof also encompasses cases in which, in addition to replacement of one or more CDR regions within a VH and/or VL of the first and/or second binding domain further mutation/s (e.g. substitutions) of at least one single amino acid residue/s within the framework (“FR”) regions between the CDRs has/have been effected such that the amino acids at that/those positions correspond/s to the amino acid/s at that/those position/s in the animal from which the CDR regions used for replacement is/are derived. As is known in the art, such individual mutations are often made in the framework regions following CDR-grafting in order to restore the original binding affinity of the non-human antibody used as a CDR-donor for its target molecule. The term “humanized” may further encompass (an) amino acid substitution(s) in the CDR regions from a non-human animal to the amino acid(s) of a corresponding CDR region from a human antibody, in addition to the amino acid substitutions in the framework regions as described above.

[0105] As used herein, the term “homolog” or “homology” is to be understood as follows: Homology among proteins and DNA is often concluded on the basis of sequence similarity, especially in bioinformatics. For example, in general, if two or more genes have highly similar DNA sequences, it is likely that they are homologous. But sequence similarity may arise from different ancestors: short sequences may be similar by chance, and sequences may be similar because both were selected to bind to a particular protein, such as a transcription factor. Such sequences are similar but not homologous. Sequence regions that are homologous are also called conserved. This is not to be confused with conservation in amino acid sequences in which the amino acid at a specific position has changed but the physio-chemical properties of the amino acid remain unchanged. Homologous sequences are of two types: orthologous and paralogous. Homologous sequences are orthologous if they were separated by a speciation event: when a species diverges into two separate species, the divergent copies of a single gene in the resulting species are said to be orthologous. Orthologs, or orthologous genes, are genes in different species that are similar to each other because they originated from a common ancestor. The strongest evidence that two similar genes are orthologous is the result of a phylogenetic analysis of the gene lineage. Genes that are found within one clade are orthologs, descended from a common ancestor. Orthologs often, but not always, have the same function. Orthologous sequences provide useful information in taxonomic classification studies of organisms. The pattern of genetic divergence can be used to trace the relatedness of organisms. Two organisms that are very closely related are likely to display very similar DNA sequences between two orthologs. Conversely, an organism that is further removed evolutionarily from another organism is likely to display a greater divergence in the sequence of the orthologs being studied. Homologous sequences are paralogous if they were separated by a gene duplication event: if a gene in an organism is duplicated to occupy two different positions in the same genome, then the two copies are paralogous. A set of sequences that are paralogous are called paralogs of each other. Paralogs typically have the same or similar function, but sometimes do not: due to lack of the original selective pressure upon one copy of the duplicated gene, this copy is free to mutate and acquire new functions. An example can be found in rodents such as rats and mice. Rodents have a pair of paralogous insulin genes, although it is unclear if any divergence in function has occurred. Paralogous genes often belong to the same species, but this is not necessary: for example, the hemoglobin gene of humans and the myoglobin gene of chimpanzees are paralogs. This is a common problem in bioinformatics: when genomes of different species have been sequenced and homologous genes have been found, one can not immediately conclude that these genes have the same or similar function, as they could be paralogs whose function has diverged.

[0106] As used herein, a “non-chimpanzee primate” or “non-chimp primate” or grammatical variants thereof refers to any primate animal (i.e. not human) other than chimpanzee, i.e. other than an animal of belonging to the genus Pan, and including the species Pan paniscus and Pan troglodytes, also known as Anthropopithecus troglodytes or Simia satyrus. It will be understood, however, that it is possible that the antibodies of the invention can also bind with their first and/or second binding domain to the respective epitopes/fragments etc. of said chimpanzees. The intention is merely to avoid animal tests which are carried out with chimpanzees, if desired. It is thus also envisaged that in another embodiment the antibodies of the present invention also bind with their first and/or second binding domain to the respective epitopes of chimpanzees. A “primate”, “primate species”, “primates” or grammatical variants thereof denote/s an order of eutherian mammals divided into the two suborders of prosimians and anthropoids and comprising apes, monkeys and lemurs. Specifically, “primates” as used herein comprises the suborder Strepsirrhini (non-tarsier prosimians), including the infraorder Lemuriformes (itself including the superfamilies Cheirogaleoidea and Lemuroidea), the infraorder Chiromyiformes (itself including the family Daubentoniidae) and the infraorder Lorisiformes (itself including the families Lorisidae and Galagidae). “Primates” as used herein also comprises the suborder Haplorrhini, including the infraorder Tarsiiformes (itself including the family Tarsiidae), the infraorder Simiiformes (itself including the Platyrrhini, or New-World monkeys, and the Catarrhini, including the Cercopithecidea, or Old-World Monkeys).

[0107] The non-chimpanzee primate species may be understood within the meaning of the invention to be a lemur, a tarsier, a gibbon, a marmoset (belonging to New-World Monkeys of the family Cebidae) or an Old-World Monkey (belonging to the superfamily Cercopithecoidea).

[0108] As used herein, an “Old-World Monkey” comprises any monkey falling in the superfamily Cercopithecoidea, itself subdivided into the families: the Cercopithecinae, which are mainly African but include the diverse genus of macaques which are Asian and North African; and the Colobinae, which include most of the Asian genera but also the African colobus monkeys.

[0109] Specifically, within the subfamily Cercopithecinae, an advantageous non-chimpanzee primate may be from the Tribe Cercopithecini, within the genus Allenopithecus (Allen's Swamp Monkey, Allenopithecus nigroviridis); within the genus Miopithecus (Angolan Talapoin, Miopithecus talapoin; Gabon Talapoin, Miopithecus ogouensis); within the genus Erythrocebus (Patas Monkey, Erythrocebus patas); within the genus Chlorocebus (Green Monkey, Chlorocebus sabaceus; Grivet, Chlorocebus aethiops; Bale Mountains Vervet, Chlorocebus djamdjamensis; Tantalus Monkey, Chlorocebus tantalus; Vervet Monkey, Chlorocebus pygerythrus; Malbrouck, Chlorocebus cynosuros); or within the genus Cercopithecus (Dryas Monkey or Salongo Monkey, Cercopithecus dryas; Diana Monkey, Cercopithecus diana; Roloway Monkey, Cercopithecus roloway; Greater Spot-nosed Monkey, Cercopithecus nictitans; Blue Monkey, Cercopithecus mitis; Silver Monkey, Cercopithecus doggetti; Golden Monkey, Cercopithecus kandti; Sykes's Monkey, Cercopithecus albogularis; Mona Monkey, Cercopithecus mona; Campbell's Mona Monkey, Cercopithecus campbelli; Lowe's Mona Monkey, Cercopithecus lowei; Crested Mona Monkey, Cercopithecus pogonias; Wolfs Mona Monkey, Cercopithecus wolfi; Dent's Mona Monkey, Cercopithecus denti; Lesser Spot-nosed Monkey, Cercopithecus petaurista; White-throated Guenon, Cercopithecus erythrogaster; Sclater's Guenon, Cercopithecus sclateri; Red-eared Guenon, Cercopithecus erythrotis; Moustached Guenon, Cercopithecus cephus; Red-tailed Monkey, Cercopithecus ascanius; L'Hoest's Monkey, Cercopithecus lhoesti; Preuss's Monkey, Cercopithecus preussi; Sun-tailed Monkey, Cercopithecus solatus; Hamlyn's Monkey or Owl-faced Monkey, Cercopithecus hamlyni; De Brazza's Monkey, Cercopithecus neglectus).

[0110] Alternatively, an advantageous non-chimpanzee primate, also within the subfamily Cercopithecinae but within the Tribe Papionini, may be from within the genus Macaca (Barbary Macaque, Macaca sylvanus; Lion-tailed Macaque, Macaca silenus; Southern Pig-tailed Macaque or Beruk, Macaca nemestrina; Northern Pig-tailed Macaque, Macaca leonina; Pagai Island Macaque or Bokkoi, Macaca pagensis; Siberut Macaque, Macaca siberu; Moor Macaque, Macaca maura; Booted Macaque, Macaca ochreata; Tonkean Macaque, Macaca tonkeana; Heck's Macaque, Macaca hecki; Gorontalo Macaque, Macaca nigriscens; Celebes Crested Macaque or Black “Ape”, Macaca nigra; Cynomolgus monkey or Crab-eating Macaque or Long-tailed Macaque or Kera, Macaca fascicularis; Stump-tailed Macaque or Bear Macaque, Macaca arctoides; Rhesus Macaque, Macaca mulatta; Formosan Rock Macaque, Macaca cyclopis; Japanese Macaque, Macaca fuscata; Toque Macaque, Macaca sinica; Bonnet Macaque, Macaca radiata; Barbary Macaque, Macaca sylvanmus; Assam Macaque, Macaca assamensis; Tibetan Macaque or Milne-Edwards' Macaque, Macaca thibetana; Arunachal Macaque or Munzala, Macaca munzala); within the genus Lophocebus (Gray-cheeked Mangabey, Lophocebus albigena; Lophocebus albigena albigena; Lophocebus albigena osmani; Lophocebus albigena johnstoni; Black Crested Mangabey, Lophocebus aterrimus; Opdenbosch's Mangabey, Lophocebus opdenboschi; Highland Mangabey, Lophocebus kipunji); within the genus Papio (Hamadryas Baboon, Papio hamadryas; Guinea Baboon, Papio papio; Olive Baboon, Papio anubis; Yellow Baboon, Papio cynocephalus; Chacma Baboon, Papio ursinus); within the genus Theropithecus (Gelada, Theropithecus gelada); within the genus Cercocebus (Sooty Mangabey, Cercocebus atys; Cercocebus atys atys; Cercocebus atys lunulatus; Collared Mangabey, Cercocebus torquatus; Agile Mangabey, Cercocebus agilis; Golden-bellied Mangabey, Cercocebus chrysogaster; Tana River Mangabey, Cercocebus galeritus; Sanje Mangabey, Cercocebus sanjei); or within the genus Mandrillus (Mandrill, Mandrillus sphinx; Drill, Mandrillus leucophaeus).

[0111] Most preferred is Macaca fascicularis (also known as Cynomolgus monkey and, therefore, in the Examples named “Cynomolgus”) and Macaca mulatta (rhesus monkey, named “rhesus”).

[0112] Within the subfamily Colobinae, an advantageous non-chimpanzee primate may be from the African group, within the genus Colobus (Black Colobus, Colobus satanas; Angola Colobus, Colobus angolensis; King Colobus, Colobus polykomos; Ursine Colobus, Colobus vellerosus; Mantled Guereza, Colobus guereza); within the genus Piliocolobus (Western Red Colobus, Piliocolobus badius; Piliocolobus badius badius; Piliocolobus badius temminckii; Piliocolobus badius waldronae; Pennant's Colobus, Piliocolobus pennantii; Piliocolobus pennantii pennantii; Piliocolobus pennantii epieni; Piliocolobus pennantii bouvieri; Preuss's Red Colobus, Piliocolobus preussi; Thollon's Red Colobus, Piliocolobus tholloni; Central African Red Colobus, Piliocolobus foai; Piliocolobus foai foai; Piliocolobus foai ellioti; Piliocolobus foai oustaleti; Piliocolobus foai semlikiensis; Piliocolobus foai parmentierorum; Ugandan Red Colobus, Piliocolobus tephrosceles; Uzyngwa Red Colobus, Piliocolobus gordonorum; Zanzibar Red Colobus, Piliocolobus kirkii; Tana River Red Colobus, Piliocolobus rufomitratus); or within the genus Procolobus (Olive Colobus, Procolobus verus). Within the subfamily Colobinae, an advantageous non-chimpanzee primate may alternatively be from the Langur (leaf monkey) group, within the genus Semnopithecus (Nepal Gray Langur, Semnopithecus schistaceus; Kashmir Gray Langur, Semnopithecus ajax; Tarai Gray Langur, Semnopithecus hector; Northern Plains Gray Langur, Semnopithecus entellus; Black-footed Gray Langur, Semnopithecus hypoleucos; Southern Plains Gray Langur, Semnopithecus dussumieri; Tufted Gray Langur, Semnopithecus priam); within the T. vetulus group or the genus Trachypithecus (Purple-faced Langur, Trachypithecus vetulus; Nilgiri Langur, Trachypithecus johnii); within the T. cristatus group of the genus Trachypithecus (Javan Lutung, Trachypithecus auratus; Silvery Leaf Monkey or Silvery Lutung, Trachypithecus cristatus; Indochinese Lutung, Trachypithecus germaini; Tenasserim Lutung, Trachypithecus barbel); within the T. obscurus group of the genus Trachypithecus (Dusky Leaf Monkey or Spectacled Leaf Monkey, Trachypithecus obscurus; Phayre's Leaf Monkey, Trachypithecus phayrei); within the T. pileatus group of the genus Trachypithecus (Capped Langur, Trachypithecus pileatus; Shortridge's Langur, Trachypithecus shortridgei; Gee's Golden Langur, Trachypithecus geei); within the T. francoisi group of the genus Trachypithecus (Francois' Langur, Trachypithecus francoisi; Hatinh Langur, Trachypithecus hatinhensis; White-headed Langur, Trachypithecus poliocephalus; Laotian Langur, Trachypithecus laotum; Delacour's Langur, Trachypithecus delacouri; Indochinese Black Langur, Trachypithecus ebenus); or within the genus Presbytis (Sumatran Surili, Presbytis melalophos; Banded Surili, Presbytis femoralis; Sarawak Surili, Presbytis chrysomelas; White-thighed Surili, Presbytis siamensis; White-fronted Surili, Presbytis frontata; Javan Surili, Presbytis comata; Thomas's Langur, Presbytis thomasi; Hose's Langur, Presbytis hosei; Maroon Leaf Monkey, Presbytis rubicunda; Mentawai Langur or Joja, Presbytis potenziani; Natuna Island Surili, Presbytis natunae).

[0113] Within the subfamily Colobinae, an advantageous non-chimpanzee primate may alternatively be from the Odd-Nosed group, within the genus Pygathrix (Red-shanked Douc, Pygathrix nemaeus; Black-shanked Douc, Pygathrix nigripes; Gray-shanked Douc, Pygathrix cinerea); within the genus Rhinopithecus (Golden Snub-nosed Monkey, Rhinopithecus roxellana; Black Snub-nosed Monkey, Rhinopithecus bieti; Gray Snub-nosed Monkey, Rhinopithecus brelichi; Tonkin Snub-nosed Langur, Rhinopithecus avunculus); within the genus Nasalis (Proboscis Monkey, Nasalis larvatus); or within the genus Simias (Pig-tailed Langur, Simias concolor).

[0114] As used herein, the term “marmoset” denotes any New-World Monkeys of the genus Callithrix, for example belonging to the Atlantic marmosets of subgenus Callithrix (sic!) (Common Marmoset, Callithrix (Callithrix) jacchus; Black-tufted Marmoset, Callithrix (Callithrix) penicillata; Wied's Marmoset, Callithrix (Callithrix) kuhlii; White-headed Marmoset, Callithrix (Callithrix) geoffroyi; Buffy-headed Marmoset, Callithrix (Callithrix) flaviceps; Buffy-tufted Marmoset, Callithrix (Callithrix) aurita); belonging to the Amazonian marmosets of subgenus Mico (Rio Acari Marmoset, Callithrix (Mico) acariensis; Manicore Marmoset, Callithrix (Mico) manicorensis; Silvery Marmoset, Callithrix (Mico) argentata; White Marmoset, Callithrix (Mico) leucippe; Emilia's Marmoset, Callithrix (Mico) emiliae; Black-headed Marmoset, Callithrix (Mico) nigriceps; Marca's Marmoset, Callithrix (Mico) marcai; Black-tailed Marmoset, Callithrix (Mico) melanura; Santarem Marmoset, Callithrix (Mico) humeralifera; Maués Marmoset, Callithrix (Mico) mauesi; Gold-and-white Marmoset, Callithrix (Mico) chrysoleuca; Hershkovitz's Marmoset, Callithrix (Mico) intermedia; Satéré Marmoset, Callithrix (Mico) saterei); Roosmalens' Dwarf Marmoset belonging to the subgenus Callibella (Callithrix (Callibella) humilis); or the Pygmy Marmoset belonging to the subgenus Cebuella (Callithrix (Cebuella) pygmaea).

[0115] Other genera of the New-World Monkeys comprise tamarins of the genus Saguinus (comprising the S. oedipus-group, the S. midas group, the S. nigricollis group, the S. mystax group, the S. bicolor group and the S. inustus group) and squirrel monkeys of the genus Samiri (e.g. Saimiri sciureus, Saimiri oerstedii, Saimiri ustus, Saimiri boliviensis, Saimiri vanzolini)

[0116] In a preferred embodiment of the bispecific single chain antibody molecule of the invention, the non-chimpanzee primate is an old world monkey. In a more preferred embodiment of the polypeptide, the old world monkey is a monkey of the Papio genus Macaque genus. Most preferably, the monkey of the Macaque genus is Assamese macaque (Macaca assamensis), Barbary macaque (Macaca sylvanus), Bonnet macaque (Macaca radiata), Booted or Sulawesi-Booted macaque (Macaca ochreata), Sulawesi-crested macaque (Macaca nigra), Formosan rock macaque (Macaca cyclopsis), Japanese snow macaque or Japanese macaque (Macaca fuscata), Cynomologus monkey or crab-eating macaque or long-tailed macaque or Java macaque (Macaca fascicularis), Lion-tailed macaque (Macaca silenus), Pigtailed macaque (Macaca nemestrina), Rhesus macaque (Macaca mulatta), Tibetan macaque (Macaca thibetana), Tonkean macaque (Macaca tonkeana), Toque macaque (Macaca sinica), Stump-tailed macaque or Red-faced macaque or Bear monkey (Macaca arctoides), or Moor macaque (Macaca maurus). Most preferably, the monkey of the Papio genus is Hamadryas Baboon, Papio hamadryas; Guinea Baboon, Papio papio; Olive Baboon, Papio anubis; Yellow Baboon, Papio cynocephalus; Chacma Baboon, Papio ursinus.

[0117] In an alternatively preferred embodiment of the bispecific single chain antibody molecule of the invention, the non-chimpanzee primate is a new world monkey. In a more preferred embodiment of the polypeptide, the new world monkey is a monkey of the Callithrix genus (marmoset), the Saguinus genus or the Samiri genus. Most preferably, the monkey of the Callithrix genus is Callithrix jacchus, the monkey of the Saguinus genus is Saguinus oedipus and the monkey of the Samiri genus is Saimiri sciureus.

[0118] The term “cell surface antigen” as used herein denotes a molecule, which is displayed on the surface of a cell. In most cases, this molecule will be located in or on the plasma membrane of the cell such that at least part of this molecule remains accessible from outside the cell in tertiary form. A non-limiting example of a cell surface molecule, which is located in the plasma membrane is a transmembrane protein comprising, in its tertiary conformation, regions of hydrophilicity and hydrophobicity. Here, at least one hydrophobic region allows the cell surface molecule to be embedded, or inserted in the hydrophobic plasma membrane of the cell while the hydrophilic regions extend on either side of the plasma membrane into the cytoplasm and extracellular space, respectively. Non-limiting examples of cell surface molecules which are located on the plasma membrane are proteins which have been modified at a cysteine residue to bear a palmitoyl group, proteins modified at a C-terminal cysteine residue to bear a farnesyl group or proteins which have been modified at the C-terminus to bear a glycosyl phosphatidyl inositol (“GPI”) anchor. These groups allow covalent attachment of proteins to the outer surface of the plasma membrane, where they remain accessible for recognition by extracellular molecules such as antibodies. Examples of cell surface antigens are CD3 epsilon and PSCA, respectively CD19, C-MET, Endosialin, EpCAM, IGF-1R or FAPα.

[0119] As described herein above, PSCA is a cell surface antigen which is a target for therapy of various cancers, including, but not limited to prostate cancer, bladder cancer or pancreatic cancer.

[0120] As also described herein above, CD19 is a cell surface antigen which is a target for therapy of various cancers, including, but not limited to B-cell malignancies such as non-Hodgkin Lymphoma, B-cell mediated autoimmune diseases or the depletion of B-cells.

[0121] As further described herein above, C-MET is a cell surface antigen which is a target for therapy of various cancers, including, but not limited to carcinomas, sarcomas, glioblastomas/astrocytomas, melanomas, mesotheliomas, Wilms tumors or hematopoietic malignancies such as leukemias, lymphomas or multiple myelomas.

[0122] Moreover, as described herein above, Endosialin is a cell surface antigen which is a target for therapy of various cancers, including, but not limited to carcinomas (breast, kidney, lung, colorectal, colon, pancreas mesothelioma), sarcomas, and neuroectodermal tumors (melanoma, glioma, neuroblastoma).

[0123] As also described herein above, EpCAM is a cell surface antigen which is a target for therapy of various cancers, including, but not limited to epithelial cancer or a minimal residual cancer.

[0124] Furthermore, as described herein above, FAP alpha is a cell surface antigen which is a target for therapy of various cancers, including, but not limited to, epithelial cancer. Moreover, as described herein above, IGF-1R is a cell surface antigen which is a target for therapy of various cancers, including, but not limited to, bone or soft tissue cancer (e.g. Ewing sarcoma), breast, liver, lung, head and neck, colorectal, prostate, leiomyosarcoma, cervical and endometrial cancer, ovarian, prostate, and pancreatic cancer, and autoimmune diseases, including, but not limited to, preferably psoriasis.

[0125] In light of this, PSCA, respectively CD19, C-MET, Endosialin, EpCAM, IGF-1R or FAPα can also be characterized as a tumor antigen. The term “tumor antigen” as used herein may be understood as those antigens that are presented on tumor cells. These antigens can be presented on the cell surface with an extracellular part, which is often combined with a transmembrane and cytoplasmic part of the molecule. These antigens can sometimes be presented only by tumor cells and never by the normal ones. Tumor antigens can be exclusively expressed on tumor cells or might represent a tumor specific mutation compared to normal cells. In this case, they are called tumor-specific antigens. More common are antigens that are presented by tumor cells and normal cells, and they are called tumor-associated antigens. These tumor-associated antigens can be overexpressed compared to normal cells or are accessible for antibody binding in tumor cells due to the less compact structure of the tumor tissue compared to normal tissue. Example for tumor antigens in line with the present invention are PSCA, CD19, C-MET, Endosialin, EpCAM, IGF-1R and FAPα.

[0126] As described herein above the bispecific single chain antibody molecule of the invention binds with the first binding domain to an epitope of human and non-chimpanzee primate CD3ε (epsilon) chain, wherein the epitope is part of an amino acid sequence comprised in the group consisting of 27 amino acid residues as depicted in SEQ ID NOs. 2, 4, 6, or 8 or a functional fragment thereof.

[0127] In line with the present invention it is preferred for the bispecific single chain antibody molecule of the invention that said epitope is part of an amino acid sequence comprising 26, 25, 24, 23, 22, 21, 20, 19, 18, 17, 16, 15, 14, 13, 12, 11, 10, 9, 8, 7, 6 or 5 amino acids.

[0128] More preferably, wherein said epitope comprises at least the amino acid sequence Gln-Asp-Gly-Asn-Glu (Q-D-G-N-E).

[0129] Within the present invention, a functional fragment of the N-terminal 1-27 amino acid residues means that said functional fragment is still a context-independent epitope maintaining its three-dimensional structural integrity when taken out of its native environment in the CD3 complex (and fused to a heterologous amino acid sequence such as EpCAM or an immunoglobulin Fc part, e.g. as shown in Example 3.1). The maintenance of the three-dimensional structure within the 27 amino acid N-terminal polypeptide or functional fragment thereof of CD3 epsilon can be used for the generation of binding domains which bind to the N-terminal CD3 epsilon polypeptide fragment in vitro and to the native (CD3 epsilon subunit of the) CD3 complex on T cells in vivo with the same binding affinity. Within the present invention, a functional fragment of the N-terminal 1-27 amino acid residues means that CD3 binding domains provided herein can still bind to such functional fragments in a context-independent manner. The person skilled in the art is aware of methods for epitope mapping to determine which amino acid residues of an epitope are recognized by such anti-CD3 binding domains (e.g. alanine scanning; see appended examples).

[0130] In one embodiment of the invention, the bispecific single chain antibody molecule of the invention comprises a (first) binding domain capable of binding to an epitope of human and non-chimpanzee primate CD3ε chain and a second binding domain capable of binding to the cell surface antigen PSCA. In alternative embodiments of the invention the said second binding domain capable of binding to the cell surface antigen CD19, C-MET, Endosialin, EpCAM, IGF-1R or FAPα

[0131] Within the present invention it is further preferred that the second binding domain binds to the human cell surface antigen PSCA, respectively CD19, C-MET, Endosialin, EpCAM, IGF-1R or FAPα and/or a non-chimpanzee primate PSCA, respectively CD19, C-MET, Endosialin, EpCAM, IGF-1R or FAPα. Particularly preferred, the second binding domain binds to the human cell surface antigen PSCA, respectively CD19, C-MET, Endosialin, EpCAM, IGF-1R or FAPα and a non-chimpanzee primate PSCA, respectively CD19, C-MET, Endosialin, EpCAM, IGF-1R or FAPα, preferably a macaque PSCA, respectively CD19, C-MET, Endosialin, EpCAM, IGF-1R or FAPα. It is to be understood, that the second binding domain binds to at least one non-chimpanzee primate PSCA, respectively CD19, C-MET, Endosialin, EpCAM, IGF-1R or FAPα, however, it may also bind to two, three or more, non-chimpanzee primate PSCA homologs, respectively CD19 homologs, C-MET homologs, Endosialin homologs, EpCAM homologs, IGF-1R homologs or FAPα homologs. For example, the second binding domain may bind to the Cynomogus monkey PSCA, respectively CD19, C-MET, Endosialin, EpCAM, IGF-1R or FAPα, and to the Rhesus monkey PSCA, respectively CD19, C-MET, Endosialin, EpCAM, IGF-1R or FAPα.

[0132] For the generation of the second binding domain of the bispecific single chain antibody molecule of the invention, e.g. bispecific single chain antibodies as defined herein, monoclonal antibodies binding to both of the respective human and/or non-chimpanzee primate cell surface antigen such as PSCA, respectively CD19, C-MET, Endosialin, EpCAM, IGF-1R or FAPα, can be utilized. Appropriate binding domains for the bispecific polypeptide as defined herein e.g. can be derived from cross-species specific monoclonal antibodies by recombinant methods described in the art. A monoclonal antibody binding to a human cell surface antigen and to the homolog of said cell surface antigen in a non-chimpanzee primate can be tested by FACS assays as set forth above. It is evident to those skilled in the art that cross-species specific antibodies can also be generated by hybridoma techniques described in the literature (Milstein and Köhler, Nature 256 (1975), 495-7). For example, mice may be alternately immunized with human and non-chimpanzee primate cell surface antigen, such as PSCA, respectively CD19, C-MET, Endosialin, EpCAM, IGF-1R or FAPα. From these mice, cross-species specific antibody-producing hybridoma cells are isolated via hybridoma technology and analysed by FACS as set forth above. The generation and analysis of bispecific polypeptides such as bispecific single chain antibodies exhibiting cross-species specificity as described herein is shown in the following examples. The advantages of the bispecific single chain antibodies exhibiting cross-species specificity include the points enumerated herein.

[0133] It is particularly preferred for the bispecific single chain antibody molecule of the invention that the first binding domain capable of binding to an epitope of human and non-chimpanzee primate CD3ε chain comprises a VL region comprising CDR-L1, CDR-L2 and CDR-L3 selected from:
[0134] (a) CDR-L1 as depicted in SEQ ID NO. 27, CDR-L2 as depicted in SEQ ID NO. 28 and CDR-L3 as depicted in SEQ ID NO. 29;
[0135] (b) CDR-L1 as depicted in SEQ ID NO. 117, CDR-L2 as depicted in SEQ ID NO. 118 and CDR-L3 as depicted in SEQ ID NO. 119; and
[0136] (c) CDR-L1 as depicted in SEQ ID NO. 153, CDR-L2 as depicted in SEQ ID NO. 154 and CDR-L3 as depicted in SEQ ID NO. 155.

[0137] The variable regions, i.e. the variable light chain (“L” or “VL”) and the variable heavy chain (“H” or “VH”) are understood in the art to provide the binding domain of an antibody. This variable regions harbor the complementary determining regions.

[0138] The term “complementary determining region” (CDR) is well known in the art to dictate the antigen specificity of an antibody. The term “CDR-L” or “L CDR” or “LCDR” refers to CDRs in the VL, whereas the term “CDR-H” or “H CDR” or “HCDR” refers to the CDRs in the VH.

[0139] In an alternatively preferred embodiment of the bispecific single chain antibody molecule of the invention the first binding domain capable of binding to an epitope of human and non-chimpanzee primate CD3ε chain comprises a VH region comprising CDR-H 1, CDR-H2 and CDR-H3 selected from:
[0140] (a) CDR-H1 as depicted in SEQ ID NO. 12, CDR-H2 as depicted in SEQ ID NO. 13 and CDR-H3 as depicted in SEQ ID NO. 14;
[0141] (b) CDR-H1 as depicted in SEQ ID NO. 30, CDR-H2 as depicted in SEQ ID NO. 31 and CDR-H3 as depicted in SEQ ID NO. 32;
[0142] (c) CDR-H1 as depicted in SEQ ID NO. 48, CDR-H2 as depicted in SEQ ID NO. 49 and CDR-H3 as depicted in SEQ ID NO. 50;
[0143] (d) CDR-H1 as depicted in SEQ ID NO. 66, CDR-H2 as depicted in SEQ ID NO. 67 and CDR-H3 as depicted in SEQ ID NO. 68;
[0144] (e) CDR-H1 as depicted in SEQ ID NO. 84, CDR-H2 as depicted in SEQ ID NO. 85 and CDR-H3 as depicted in SEQ ID NO. 86;
[0145] (f) CDR-H1 as depicted in SEQ ID NO. 102, CDR-H2 as depicted in SEQ ID NO. 103 and CDR-H3 as depicted in SEQ ID NO. 104;
[0146] (g) CDR-H1 as depicted in SEQ ID NO. 120, CDR-H2 as depicted in SEQ ID NO. 121 and CDR-H3 as depicted in SEQ ID NO. 122;
[0147] (h) CDR-H1 as depicted in SEQ ID NO. 138, CDR-H2 as depicted in SEQ ID NO. 139 and CDR-H3 as depicted in SEQ ID NO. 140;
[0148] (i) CDR-H1 as depicted in SEQ ID NO. 156, CDR-H2 as depicted in SEQ ID NO. 157 and CDR-H3 as depicted in SEQ ID NO. 158; and
[0149] (j) CDR-H1 as depicted in SEQ ID NO. 174, CDR-H2 as depicted in SEQ ID NO. 175 and CDR-H3 as depicted in SEQ ID NO. 176.

[0150] It is further preferred that the binding domain capable of binding to an epitope of human and non-chimpanzee primate CD3ε chain comprises a VL region selected from the group consisting of a VL region as depicted in SEQ ID NO. 35, 39, 125, 129, 161 or 165.

[0151] It is alternatively preferred that the first binding domain capable of binding to an epitope of human and non-chimpanzee primate CD3ε chain comprises a VH region selected from the group consisting of a VH region as depicted in SEQ ID NO. 15, 19, 33, 37, 51, 55, 69, 73, 87, 91, 105, 109, 123, 127, 141, 145, 159, 163, 177 or 181.

[0152] More preferably, the bispecific single chain antibody molecule of the invention is characterized by the first binding domain capable of binding to an epitope of human and non-chimpanzee primate CD3ε chain, which comprises a VL region and a VH region selected from the group consisting of:
[0153] (a) a VL region as depicted in SEQ ID NO. 17 or 21 and a VH region as depicted in SEQ ID NO. 15 or 19;
[0154] (b) a VL region as depicted in SEQ ID NO. 35 or 39 and a VH region as depicted in SEQ ID NO. 33 or 37;
[0155] (c) a VL region as depicted in SEQ ID NO. 53 or 57 and a VH region as depicted in SEQ ID NO. 51 or 55;
[0156] (d) a VL region as depicted in SEQ ID NO. 71 or 75 and a VH region as depicted in SEQ ID NO. 69 or 73;
[0157] (e) a VL region as depicted in SEQ ID NO. 89 or 93 and a VH region as depicted in SEQ ID NO. 87 or 91;
[0158] (f) a VL region as depicted in SEQ ID NO. 107 or 111 and a VH region as depicted in SEQ ID NO. 105 or 109;
[0159] (g) a VL region as depicted in SEQ ID NO. 125 or 129 and a VH region as depicted in SEQ ID NO. 123 or 127;
[0160] (h) a VL region as depicted in SEQ ID NO. 143 or 147 and a VH region as depicted in SEQ ID NO. 141 or 145;
[0161] (i) a VL region as depicted in SEQ ID NO. 161 or 165 and a VH region as depicted in SEQ ID NO. 159 or 163; and
[0162] (j) a VL region as depicted in SEQ ID NO. 179 or 183 and a VH region as depicted in SEQ ID NO. 177 or 181.

[0163] According to a preferred embodiment of the bispecific single chain antibody molecule of the invention the pairs of VH-regions and VL-regions in the first binding domain binding to CD3 epsilon are in the format of a single chain antibody (scFv). The VH and VL regions are arranged in the order VH-VL or VL-VH. It is preferred that the VH-region is positioned N-terminally to a linker sequence. The VL-region is positioned C-terminally of the linker sequence. Put in other words, the domain arrangement in the CD3 binding domain of the bispecific single chain antibody molecule of the invention is preferably VH-VL, with said CD3 binding domain located C-terminally to the second (cell surface antigen, such as PSCA, CD19, C-MET, Endosialin, EpCAM, IGF-1R or FAPα) binding domain. Preferably the VH-VL comprises or is SEQ ID NO. 185.

[0164] A preferred embodiment of the above described bispecific single chain antibody molecule of the invention is characterized by the first binding domain capable of binding to an epitope of human and non-chimpanzee primate CD3ε chain comprising an amino acid sequence selected from the group consisting of SEQ ID NOs: 23, 25, 41, 43, 59, 61, 77, 79, 95, 97, 113, 115, 131, 133, 149, 151, 167, 169, 185 or 187.

[0165] The invention further relates to an above described bispecific single chain antibody, wherein the second binding domain binds to the cell surface antigen PSCA, CD19, C-MET, Endosialin, EpCAM, IGF-1R or FAPα.

### PSCA×CD3

[0166] According to a preferred embodiment of the invention an above characterized bispecific single chain antibody molecule comprises a group of the following sequences as CDR H1, CDR H2, CDR H3, CDR L1, CDR L2 and CDR L3 in the second binding domain selected from the group consisting of:
[0167] a) CDR H1-3 of SEQ ID NO: 382-384 and CDR L1-3 of SEQ ID NO: 377-379;
[0168] b) CDR H1-3 of SEQ ID NO: 400-402 and CDR L1-3 of SEQ ID NO: 395-397;
[0169] c) CDR H1-3 of SEQ ID NO: 414-416 and CDR L1-3 of SEQ ID NO: 409-411;
[0170] d) CDR H1-3 of SEQ ID NO: 432-434 and CDR L1-3 of SEQ ID NO: 427-429;
[0171] e) CDR H1-3 of SEQ ID NO: 1215-1217 and CDR L1-3 of SEQ ID NO: 1220-1222;
[0172] f) CDR H1-3 of SEQ ID NO: 1187-1189 and CDR L1-3 of SEQ ID NO: 1192-1194;
[0173] g) CDR H1-3 of SEQ ID NO: 1173-1175 and CDR L1-3 of SEQ ID NO: 1178-1180;
[0174] h) CDR H1-3 of SEQ ID NO: 1229-1231 and CDR L1-3 of SEQ ID NO: 1234-1236;
[0175] i) CDR H1-3 of SEQ ID NO: 1201-1203 and CDR L1-3 of SEQ ID NO: 1206-1208;
[0176] k) CDR H1-3 of SEQ ID NO: 1257-1259 and CDR L1-3 of SEQ ID NO: 1262-1264; and
[0177] l) CDR H1-3 of SEQ ID NO: 1243-1245 and CDR L1-3 of SEQ ID NO: 1248-1250.

[0178] The sequences of the corresponding VL- and VH-regions of the second binding domain of the bispecific single chain antibody molecule of the invention as well as of the respective scFvs are shown in the sequence listing.

[0179] In the bispecific single chain antibody molecule of the invention the binding domains are arranged in the order VL-VH-VH-VL, VL-VH-VL-VH, VH-VL-VH-VL or VH-VL-VL-VH, as exemplified in the appended examples. Preferably, the binding domains are arranged in the order VH PSCA-VL PSCA-VH CD3-VL CD3 or VL PSCA-VH PSCA-VH CD3-VL CD3.

[0180] A particularly preferred embodiment of the invention concerns an above characterized polypeptide, wherein the bispecific single chain antibody molecule comprises a sequence selected from:
[0181] (a) an amino acid sequence as depicted in any of SEQ ID NOs: 389, 421, 439, 391, 405, 423, 441, 1226, 1198, 1184, 1240, 1212, 1268 or 1254
[0182] (b) an amino acid sequence encoded by a nucleic acid sequence as depicted in any of SEQ ID NOs: 390, 422, 440, 392, 406, 424, 442, 1227, 1199, 1185, 1241, 1213, 1269 or 1255; and
[0183] (c) an amino acid sequence at least 90% identical, more preferred at least 95% identical, most preferred at least 96% identical to the amino acid sequence of (a) or (b).

[0184] The invention relates to a bispecific single chain antibody molecule comprising an amino acid sequence as depicted in any of SEQ ID NOs: 389, 421, 439, 391, 405, 423, 441, 1226, 1198, 1184, 1240, 1212, 1268 or 1254, as well as to an amino acid sequences at least 85% identical, preferably 90%, more preferred at least 95% identical, most preferred at least 96, 97, 98, or 99% identical to the amino acid sequence of SEQ ID NOs: 389, 421, 439, 391, 405, 423, 441, 1226, 1198, 1184, 1240, 1212, 1268 or 1254. The invention relates also to the corresponding nucleic acid sequences as depicted in any of SEQ ID NOs: 390, 422, 440, 392, 406, 424, 442, 1227, 1199, 1185, 1241, 1213, 1269 or 1255 as well as to nucleic acid sequences at least 85% identical, preferably 90%, more preferred at least 95 identical, most preferred at least 96, 97, 98, or 99% identical to the nucleic acid sequences shown in SEQ ID NOs: 390, 422, 440, 392, 406, 424, 442, 1227, 1199, 1185, 1241, 1213, 1269 or 1255. It is to be understood that the sequence identity is determined over the entire nucleotide or amino acid sequence. For sequence alignments, for example, the programs Gap or BestFit can be used (Needleman and Wunsch J. Mol. Biol. 48 (1970), 443-453; Smith and Waterman, Adv. Appl. Math 2 (1981), 482-489), which is contained in the GCG software package (Genetics Computer Group, 575 Science Drive, Madison, Wis., USA 53711 (1991). It is a routine method for those skilled in the art to determine and identify a nucleotide or amino acid sequence having e.g. 85% (90%, 95%, 96%, 97%, 98% or 99%) sequence identity to the nucleotide or amino acid sequences of the bispecific single single chain antibody of the invention. For example, according to Crick's Wobble hypothesis, the 5′ base on the anti-codon is not as spatially confined as the other two bases, and could thus have non-standard base pairing. Put in other words: the third position in a codon triplet may vary so that two triplets which differ in this third position may encode the same amino acid residue. Said hypothesis is well known to the person skilled in the art (see e.g. http://en.wikipedia.org/wiki/Wobble_Hypothesis; Crick, J Mol Biol 19 (1966): 548-55).

[0185] Preferred domain arrangements in the PSCA×CD3 bispecific single chain antibody constructs of the invention are shown in the following examples.

[0186] In a preferred embodiment of the invention, the bispecific single chain antibodies are cross-species specific for CD3 epsilon and for the human and non-chimpanzee primate cell surface antigen PSCA recognized by their second binding domain.

### CD19×CD3

[0187] According to an alternatively preferred embodiment of the invention an above characterized bispecific single chain antibody molecule comprises a group of the following sequences as CDR H1, CDR H2, CDR H3, CDR L1, CDR L2 and CDR L3 in the second binding domain selected from the group consisting of:
[0188] a) CDR H1-3 of SEQ ID NO: 478-480 and CDR L1-3 of SEQ ID NO: 473-475;
[0189] b) CDR H1-3 of SEQ ID NO: 530-532 and CDR L1-3 of SEQ ID NO: 525-527;
[0190] c) CDR H1-3 of SEQ ID NO: 518-520 and CDR L1-3 of SEQ ID NO: 513-515;
[0191] d) CDR H1-3 of SEQ ID NO: 506-508 and CDR L1-3 of SEQ ID NO: 501-503;
[0192] e) CDR H1-3 of SEQ ID NO: 494-496 and CDR L1-3 of SEQ ID NO: 489-491;
[0193] f) CDR H1-3 of SEQ ID NO: 542-544 and CDR L1-3 of SEQ ID NO: 537-539;
[0194] g) CDR H1-3 of SEQ ID NO: 554-556 and CDR L1-3 of SEQ ID NO: 549-551;
[0195] h) CDR H1-3 of SEQ ID NO: 566-568 and CDR L1-3 of SEQ ID NO: 561-563;
[0196] i) CDR H1-3 of SEQ ID NO: 578-580 and CDR L1-3 of SEQ ID NO: 573-575;
[0197] j) CDR H1-3 of SEQ ID NO: 590-592 and CDR L1-3 of SEQ ID NO: 585-587;
[0198] k) CDR H1-3 of SEQ ID NO: 602-604 and CDR L1-3 of SEQ ID NO: 597-599;
[0199] l) CDR H1-3 of SEQ ID NO: 614-616 and CDR L1-3 of SEQ ID NO: 609-611,
[0200] m) CDR H1-3 of SEQ ID NO: 626-628 and CDR L1-3 of SEQ ID NO: 621-623;
[0201] n) CDR H1-3 of SEQ ID NO: 638-640 and CDR L1-3 of SEQ ID NO: 633-635;
[0202] o) CDR H1-3 of SEQ ID NO: 650-652 and CDR L1-3 of SEQ ID NO: 645-647;
[0203] p) CDR H1-3 of SEQ ID NO: 662-664 and CDR L1-3 of SEQ ID NO: 657-659;
[0204] q) CDR H1-3 of SEQ ID NO: 674-676 and CDR L1-3 of SEQ ID NO: 669-671;
[0205] r) CDR H1-3 of SEQ ID NO: 686-688 and CDR L1-3 of SEQ ID NO: 681-683;
[0206] s) CDR H1-3 of SEQ ID NO: 698-700 and CDR L1-3 of SEQ ID NO: 693-695;
[0207] t) CDR H1-3 of SEQ ID NO: 710-712 and CDR L1-3 of SEQ ID NO: 705-707;
[0208] u) CDR H1-3 of SEQ ID NO: 722-724 and CDR L1-3 of SEQ ID NO: 717-719;
[0209] v) CDR H1-3 of SEQ ID NO: 734-736 and CDR L1-3 of SEQ ID NO: 729-731;
[0210] w) CDR H1-3 of SEQ ID NO: 746-748 and CDR L1-3 of SEQ ID NO: 741-743;
[0211] x) CDR H1-3 of SEQ ID NO: 758-760 and CDR L1-3 of SEQ ID NO: 753-755;
[0212] y) CDR H1-3 of SEQ ID NO: 1271-1273 and CDR L1-3 of SEQ ID NO: 1276-1278;
[0213] z) CDR H1-3 of SEQ ID NO: 1285-1287 and CDR L1-3 of SEQ ID NO: 1290-1292;
[0214] aa) CDR H1-3 of SEQ ID NO: 1299-1301 and CDR L1-3 of SEQ ID NO: 1304-1306;
[0215] ab) CDR H1-3 of SEQ ID NO: 1313-1315 and CDR L1-3 of SEQ ID NO: 1318-1320;
[0216] ac) CDR H1-3 of SEQ ID NO: 1327-1329 and CDR L1-3 of SEQ ID NO: 1332-1334;
[0217] ad) CDR H1-3 of SEQ ID NO: 1341-1343 and CDR L1-3 of SEQ ID NO: 1346-1348;
[0218] ae) CDR H1-3 of SEQ ID NO: 1355-1357 and CDR L1-3 of SEQ ID NO: 1360-1362;
[0219] af) CDR H1-3 of SEQ ID NO: 1369-1371 and CDR L1-3 of SEQ ID NO: 1374-1376; and
[0220] ag) CDR H1-3 of SEQ ID NO: 1383-1385 and CDR L1-3 of SEQ ID NO: 1388-1390.

[0221] The sequences of the corresponding VL- and VH-regions of the second binding domain of the bispecific single chain antibody molecule of the invention as well as of the respective scFvs are shown in the sequence listing.

[0222] In the bispecific single chain antibody molecule of the invention the binding domains are arranged in the order VL-VH-VH-VL, VL-VH-VL-VH, VH-VL-VH-VL or VH-VL-VL-VH, as exemplified in the appended examples. Preferably, the binding domains are arranged in the order VH CD19-VL CD19-VH CD3-VL CD3 or VL CD19-VH CD19-VH CD3-VL CD3. More preferably, the binding domains are arranged in the order VL CD19-VH CD19-VH CD3-VL CD3.

[0223] A particularly preferred embodiment of the invention concerns an above characterized polypeptide, wherein the bispecific single chain antibody molecule comprises a sequence selected from:
[0224] (a) an amino acid sequence as depicted in any of SEQ ID NOs. 481, 485, 483, 533, 521, 509, 497, 545, 557, 569, 581, 593, 605, 617, 629, 641, 653, 665, 677, 689, 701, 713, 725, 737, 749, 761, 1282, 1296, 1310, 1324, 1338, 1352, 1366, 1380 or 1394;
[0225] (b) an amino acid sequence encoded by a nucleic acid sequence as depicted in any of SEQ ID NOs: 482, 486, 484, 534, 522, 510, 498, 546, 558, 570, 582, 594, 606, 618, 630, 642, 654, 666, 678, 690, 702, 714, 726, 738, 750, 762, 1283, 1297, 1311, 1325, 1339, 1353, 1367, 1381 or 1395; and
[0226] (c) an amino acid sequence at least 90% identical, more preferred at least 95% identical, most preferred at least 96% identical to the amino acid sequence of (a) or (b).

[0227] The invention relates to a bispecific single chain antibody molecule comprising an amino acid sequence as depicted in any of SEQ ID NOs: 481, 485, 483, 533, 521, 509, 497, 545, 557, 569, 581, 593, 605, 617, 629, 641, 653, 665, 677, 689, 701, 713, 725, 737, 749, 761, 1282, 1296, 1310, 1324, 1338, 1352, 1366, 1380 or 1394, as well as to an amino acid sequences at least 85% identical, preferably 90%, more preferred at least 95% identical, most preferred at least 96, 97, 98, or 99% identical to the amino acid sequence of SEQ ID NOs: 481, 485, 483, 533, 521, 509, 497, 545, 557, 569, 581, 593, 605, 617, 629, 641, 653, 665, 677, 689, 701, 713, 725, 737, 749, 761, 1282, 1296, 1310, 1324, 1338, 1352, 1366, 1380 or 1394. The invention relates also to the corresponding nucleic acid sequences as depicted in any of SEQ ID NOs: 482, 486, 484, 534, 522, 510, 498, 546, 558, 570, 582, 594, 606, 618, 630, 642, 654, 666, 678, 690, 702, 714, 726, 738, 750, 762, 1283, 1297, 1311, 1325, 1339, 1353, 1367, 1381 or 1395 as well as to nucleic acid sequences at least 85% identical, preferably 90%, more preferred at least 95% identical, most preferred at least 96, 97, 98, or 99% identical to the nucleic acid sequences shown in SEQ ID NOs: 482, 486, 484, 534, 522, 510, 498, 546, 558, 570, 582, 594, 606, 618, 630, 642, 654, 666, 678, 690, 702, 714, 726, 738, 750, 762, 1283, 1297, 1311, 1325, 1339, 1353, 1367, 1381 or 1395. It is to be understood that the sequence identity is determined over the entire nucleotide or amino acid sequence. For sequence alignments, for example, the programs Gap or BestFit can be used (Needleman and Wunsch J. Mol. Biol. 48 (1970), 443-453; Smith and Waterman, Adv. Appl. Math 2 (1981), 482-489), which is contained in the GCG software package (Genetics Computer Group, 575 Science Drive, Madison, Wis., USA 53711 (1991). It is a routine method for those skilled in the art to determine and identify a nucleotide or amino acid sequence having e.g. 85% (90%, 95%, 96%, 97%, 98% or 99%) sequence identity to the nucleotide or amino acid sequences of the bispecific single chain antibody of the invention. For example, according to Crick's Wobble hypothesis, the 5′ base on the anti-codon is not as spatially confined as the other two bases, and could thus have non-standard base pairing. Put in other words: the third position in a codon triplet may vary so that two triplets which differ in this third position may encode the same amino acid residue. Said hypothesis is well known to the person skilled in the art (see e.g. http://en.wikipedia.org/wiki/Wobble_Hypothesis; Crick, J Mol Biol 19 (1966): 548-55).

[0228] Preferred domain arrangements in the CD19×CD3 bispecific single chain antibody constructs of the invention are shown in the following examples.

[0229] In a preferred embodiment of the invention, the bispecific single chain antibodies are cross-species specific for CD3 epsilon and for the human and non-chimpanzee primate cell surface antigen CD19 recognized by their second binding domain.

c-MET×CD3

[0230] According to a preferred embodiment of the invention an above characterized bispecific single chain antibody molecule comprises a group of the following sequences as CDR H1, CDR H2, CDR H3, CDR L1, CDR L2 and CDR L3 in the second binding domain selected from the group consisting of:
[0231] a) CDR H1-3 of SEQ ID NO: 821-823 and CDR L1-3 of SEQ ID NO: 816-818;
[0232] b) CDR H1-3 of SEQ ID NO: 836-838 and CDR L1-3 of SEQ ID NO: 833-835;
[0233] c) CDR H1-3 of SEQ ID NO: 845-847 and CDR L1-3 of SEQ ID NO: 840-842;
[0234] d) CDR H1-3 of SEQ ID NO: 863-865 and CDR L1-3 of SEQ ID NO: 858-860;
[0235] e) CDR H1-3 of SEQ ID NO: 881-883 and CDR L1-3 of SEQ ID NO: 876-878;
[0236] f) CDR H1-3 of SEQ ID NO: 899-901 and CDR L1-3 of SEQ ID NO: 894-896;
[0237] g) CDR H1-3 of SEQ ID NO: 1401-1403 and CDR L1-3 of SEQ ID NO: 1406-1408;
[0238] h) CDR H1-3 of SEQ ID NO: 1415-1417 and CDR L1-3 of SEQ ID NO: 1420-1422;
[0239] i) CDR H1-3 of SEQ ID NO: 1429-1431 and CDR L1-3 of SEQ ID NO: 1434-1436;
[0240] j) CDR H1-3 of SEQ ID NO: 1443-1445 and CDR L1-3 of SEQ ID NO: 1448-1450;
[0241] k) CDR H1-3 of SEQ ID NO: 1457-1459 and CDR L1-3 of SEQ ID NO: 1462-1464;
[0242] l) CDR H1-3 of SEQ ID NO: 1471-1473 and CDR L1-3 of SEQ ID NO: 1476-1478;
[0243] m) CDR H1-3 of SEQ ID NO: 1639-1641 and CDR L1-3 of SEQ ID NO: 1644-1646;
[0244] n) CDR H1-3 of SEQ ID NO: 1625-1627 and CDR L1-3 of SEQ ID NO: 1630-1632;
[0245] o) CDR H1-3 of SEQ ID NO: 1611-1613 and CDR L1-3 of SEQ ID NO: 1616-1618;
[0246] p) CDR H1-3 of SEQ ID NO: 1597-1599 and CDR L1-3 of SEQ ID NO: 1602-1604;
[0247] q) CDR H1-3 of SEQ ID NO: 1569-1571 and CDR L1-3 of SEQ ID NO: 1574-1576;
[0248] r) CDR H1-3 of SEQ ID NO: 1555-1557 and CDR L1-3 of SEQ ID NO: 1560-1562;
[0249] s) CDR H1-3 of SEQ ID NO: 1583-1585 and CDR L1-3 of SEQ ID NO: 1588-1590;
[0250] t) CDR H1-3 of SEQ ID NO: 1541-1543 and CDR L1-3 of SEQ ID NO: 1546-1548;
[0251] u) CDR H1-3 of SEQ ID NO: 1513-1515 and CDR L1-3 of SEQ ID NO: 1518-1520;
[0252] v) CDR H1-3 of SEQ ID NO: 1527-1529 and CDR L1-3 of SEQ ID NO: 1532-1534;
[0253] w) CDR H1-3 of SEQ ID NO: 1499-1501 and CDR L1-3 of SEQ ID NO: 1504-1506; and
[0254] x) CDR H1-3 of SEQ ID NO: 1485-1487 and CDR L1-3 of SEQ ID NO: 1490-1492.

[0255] The sequences of the corresponding VL- and VH-regions of the second binding domain of the bispecific single chain antibody molecule of the invention as well as of the respective scFvs are shown in the sequence listing.

[0256] In the bispecific single chain antibody molecule of the invention the binding domains are arranged in the order VL-VH-VH-VL, VL-VH-VL-VH, VH-VL-VH-VL or VH-VL-VL-VH, as exemplified in the appended examples. Preferably, the binding domains are arranged in the order VH C-MET-VL C-MET-VH CD3-VL CD3 or VL C-MET-VH C-MET-VH CD3-VL CD3.

[0257] A particularly preferred embodiment of the invention concerns an above characterized polypeptide, wherein the bispecific single chain antibody molecule comprises a sequence selected from:
[0258] (a) an amino acid sequence as depicted in any of SEQ ID NOs. 829, 853, 871, 889, 831, 855, 873, 891, 905, 1412, 1426, 1440, 1454, 1468 or 1482;
[0259] (b) an amino acid sequence encoded by a nucleic acid sequence as depicted in any of SEQ ID NOs: 830, 854, 872, 890, 832, 856, 874, 892, 906, 1413, 1427, 1441, 1455, 1469, or 1483; and
[0260] (c) an amino acid sequence at least 90% identical, more preferred at least 95% identical, most preferred at least 96% identical to the amino acid sequence of (a) or (b).

[0261] The invention relates to a bispecific single chain antibody molecule comprising an amino acid sequence as depicted in any of SEQ ID NOs: 829, 853, 871, 889, 831, 855, 873, 891, 905, 1412, 1426, 1440, 1454, 1468 or 1482, as well as to an amino acid sequences at least 85% identical, preferably 90%, more preferred at least 95% identical, most preferred at least 96, 97, 98, or 99% identical to the amino acid sequence of SEQ ID NOs: 829, 853, 871, 889, 831, 855, 873, 891, 905, 1412, 1426, 1440, 1454, 1468 or 1482. The invention relates also to the corresponding nucleic acid sequences as depicted in any of SEQ ID NOs: 830, 854, 872, 890, 832, 856, 874, 892, 906, 1413, 1427, 1441, 1455, 1469, or 1483; as well as to nucleic acid sequences at least 85% identical, preferably 90%, more preferred at least 95% identical, most preferred at least 96, 97, 98, or 99% identical to the nucleic acid sequences shown in SEQ ID NOs: 830, 854, 872, 890, 832, 856, 874, 892, 906, 1413, 1427, 1441, 1455, 1469, or 1483. It is to be understood that the sequence identity is determined over the entire nucleotide or amino acid sequence. For sequence alignments, for example, the programs Gap or BestFit can be used (Needleman and Wunsch J. Mol. Biol. 48 (1970), 443-453; Smith and Waterman, Adv. Appl. Math 2 (1981), 482-489), which is contained in the GCG software package (Genetics Computer Group, 575 Science Drive, Madison, Wis., USA 53711 (1991). It is a routine method for those skilled in the art to determine and identify a nucleotide or amino acid sequence having e.g. 85% (90%, 95%, 96%, 97%, 98% or 99%) sequence identity to the nucleotide or amino acid sequences of the bispecific single chain antibody of the invention. For example, according to Crick's Wobble hypothesis, the 5′ base on the anti-codon is not as spatially confined as the other two bases, and could thus have non-standard base pairing. Put in other words: the third position in a codon triplet may vary so that two triplets which differ in this third position may encode the same amino acid residue. Said hypothesis is well known to the person skilled in the art (see e.g. http://en.wikipedia.org/wiki/Wobble_Hypothesis; Crick, J Mol Biol 19 (1966): 548-55).

[0262] Preferred domain arrangements in the C-MET×CD3 bispecific single chain antibody constructs of the invention are shown in the following examples.

[0263] In a preferred embodiment of the invention, the bispecific single chain antibodies are cross-species specific for CD3 epsilon and for the human and non-chimpanzee primate cell surface antigen C-MET recognized by their second binding domain.

### Endosialin×CD3

[0264] According to a preferred embodiment of the invention an above characterized bispecific single chain antibody molecule comprises a group of the following sequences as CDR H1, CDR H2, CDR H3, CDR L1, CDR L2 and CDR L3 in the second binding domain selected from the group consisting of:
[0265] CDR H1-3 of SEQ ID NO: 910-912 and CDR L1-3 of SEQ ID NO: 907-909.

[0266] Starting from these CDR sequences of the heavy and light chain for the second binding domain the person skilled in the art can produce a bispecific single chain antibody molecule of the invention without any further inventive ado. In particular, the CDR sequences can be positioned in a framework of a VL and a VH chain and arranged in form of a scFv.

[0267] According to a preferred embodiment of the invention an above characterized bispecific single chain antibody molecule comprises a group of the following sequences as CDR H1, CDR H2, CDR H3, CDR L1, CDR L2 and CDR L3 in the second binding domain selected from the group consisting of:
[0268] a) CDR H1-3 of SEQ ID NO: 1653-1655 and CDR L1-3 of SEQ ID NO: 1658-1660;
[0269] b) CDR H1-3 of SEQ ID NO: 1667-1669 and CDR L1-3 of SEQ ID NO: 1672-1674;
[0270] c) CDR H1-3 of SEQ ID NO: 1681-1683 and CDR L1-3 of SEQ ID NO: 1686-1688; and
[0271] d) CDR H1-3 of SEQ ID NO: 1695-1697 and CDR L1-3 of SEQ ID NO: 1700-1702;
[0272] e) CDR H1-3 of SEQ ID NO: 1709-1711 and CDR L1-3 of SEQ ID NO: 1714-1716; and
[0273] f) CDR H1-3 of SEQ ID NO: 1723-1725 and CDR L1-3 of SEQ ID NO: 1728-1730.

[0274] In the bispecific single chain antibody molecule of the invention the binding domains are arranged in the order VL-VH-VH-VL, VL-VH-VL-VH, VH-VL-VH-VL or VH-VL-VL-VH, as exemplified in the appended examples. Preferably, the binding domains are arranged in the order VH Endosialin-VL Endosialin-VH CD3-VL CD3 or VL Endosialin-VH Endosialin-VH CD3-VL CD3.

[0275] A particularly preferred embodiment of the invention concerns an above characterized polypeptide, wherein the bispecific single chain antibody molecule comprises an above characterized first binding domain capable of binding to an epitope of human and non-chimpanzee primate CD3ε and a second binding domain capable of binding to Endosialin and comprising the CDR H1, 2 and 3 of SEQ ID NOs: 910-912 and the CDR L1, 2 and 3 of SEQ ID NOs: 907-909, or CDR amino acid sequences at least 50%, 60%, 70%, 75%, 80%, 85%, or 90% identical, more preferred at least 95% identical, most preferred at least 96%, 97%, 98%, or 99% identical to each of the respective amino acid sequences of the above defined CDRs. It is to be understood that the sequence identity is determined over the entire CDRH or CDRL amino acid sequence.

[0276] A particularly preferred embodiment of the invention concerns an above characterized polypeptide, wherein the bispecific single chain antibody molecule comprises a sequence selected from:
[0277] (a) an amino acid sequence as depicted in any of SEQ ID NOs. 1664, 1678, 1692, 1706, 1720, or 1734;
[0278] (b) an amino acid sequence encoded by a nucleic acid sequence as depicted in any of SEQ ID NOs: 1665, 1679, 1693, 1707, 1721, or 1735; and
[0279] (c) an amino acid sequence at least 90% identical, more preferred at least 95% identical, most preferred at least 96% identical to the amino acid sequence of (a) or (b).

[0280] The invention relates to a bispecific single chain antibody molecule comprising an amino acid sequence as depicted in any of SEQ ID NOs: 1664, 1678, 1692, 1706, 1720, or 1734, as well as to an amino acid sequences at least 85% identical, preferably 90%, more preferred at least 95% identical, most preferred at least 96, 97, 98, or 99% identical to the amino acid sequence of SEQ ID NOs: 1664, 1678, 1692, 1706, 1720, or 1734. The invention relates also to the corresponding nucleic acid sequences as depicted in any of SEQ ID NOs: 1665, 1679, 1693, 1707, 1721, or 1735; as well as to nucleic acid sequences at least 85% identical, preferably 90%, more preferred at least 95% identical, most preferred at least 96, 97, 98, or 99% identical to the nucleic acid sequences shown in SEQ ID NOs: 1665, 1679, 1693, 1707, 1721, or 1735.

[0281] If not indicated otherwise, it is to be understood that the sequence identity is determined over the entire nucleotide or amino acid sequence. For sequence alignments, for example, the programs Gap or BestFit can be used (Needleman and Wunsch J. Mol. Biol. 48 (1970), 443-453; Smith and Waterman, Adv. Appl. Math 2 (1981), 482-489), which is contained in the GCG software package (Genetics Computer Group, 575 Science Drive, Madison, Wis., USA 53711 (1991). It is a routine method for those skilled in the art to determine and identify a nucleotide or amino acid sequence or CDR sequence having e.g. 50% (60%, 70%, 75%, 80%, 85%, 90%, 95%, 96%, 97%, 98% or 99%) sequence identity to the nucleotide or amino acid or CDR sequences of the bispecific single chain antibody of the invention. For example, according to Crick's Wobble hypothesis, the 5′ base on the anti-codon is not as spatially confined as the other two bases, and could thus have non-standard base pairing. Put in other words: the third position in a codon triplet may vary so that two triplets which differ in this third position may encode the same amino acid residue. Said hypothesis is well known to the person skilled in the art (see e.g. http://en.wikipedia.org/wiki/Wobble_Hypothesis; Crick, J Mol Biol 19 (1966): 548-55).

[0282] Preferred domain arrangements in the Endosialin×CD3 bispecific single chain antibody constructs of the invention are shown in the following examples.

[0283] In a preferred embodiment of the invention, the bispecific single chain antibodies are cross-species specific for CD3 epsilon and for the human and non-chimpanzee primate cell surface antigen Endosialin recognized by their second binding domain.

### EpCAM×CD3

[0284] According to a preferred embodiment of the invention an above characterized bispecific single chain antibody molecule comprises a group of the following sequences as CDR H1, CDR H2, CDR H3, CDR L1, CDR L2 and CDR L3 in the second binding domain selected from the group consisting of:
[0285] a) CDR H1-3 of SEQ ID NO: 940-942 and CDR L1-3 of SEQ ID NO: 935-937;
[0286] b) CDR H1-3 of SEQ ID NO: 956-958 and CDR L1-3 of SEQ ID NO: 951-953;
[0287] c) CDR H1-3 of SEQ ID NO: 968-970 and CDR L1-3 of SEQ ID NO: 963-965; and
[0288] d) CDR H1-3 of SEQ ID NO: 980-982 and CDR L1-3 of SEQ ID NO: 975-977;
[0289] e) CDR H1-3 of SEQ ID NO: 992-994 and CDR L1-3 of SEQ ID NO: 987-989;
[0290] f) CDR H1-3 of SEQ ID NO: 1004-1006 and CDR L1-3 of SEQ ID NO: 999-1001;
[0291] g) CDR H1-3 of SEQ ID NO: 1028-1030 and CDR L1-3 of SEQ ID NO: 1023-1025;
[0292] h) CDR H1-3 of SEQ ID NO: 1040-1042 and CDR L1-3 of SEQ ID NO: 1035-1037;
[0293] i) CDR H1-3 of SEQ ID NO: 1052-1054 and CDR L1-3 of SEQ ID NO: 1047-1049;
[0294] j) CDR H1-3 of SEQ ID NO: 1074-1076 and CDR L1-3 of SEQ ID NO: 1069-1071;
[0295] k) CDR H1-3 of SEQ ID NO: 1086-1088 and CDR L1-3 of SEQ ID NO: 1081-1083;
[0296] l) CDR H1-3 of SEQ ID NO: 1098-1000 and CDR L1-3 of SEQ ID NO: 1093-1095;
[0297] m) CDR H1-3 of SEQ ID NO: 1110-1112 and CDR L1-3 of SEQ ID NO: 1105-1107;
[0298] n) CDR H1-3 of SEQ ID NO: 1122-1124 and CDR L1-3 of SEQ ID NO: 1117-1119;
[0299] o) CDR H1-3 of SEQ ID NO: 1016-1018 and CDR L1-3 of SEQ ID NO: 1011-1013; and
[0300] p) CDR H1-3 of SEQ ID NO: 1765-1767 and CDR L1-3 of SEQ ID NO: 1770-1772.

[0301] The sequences of the corresponding VL- and VH-regions of the second binding domain of the bispecific single chain antibody molecule of the invention as well as of the respective scFvs are shown in the sequence listing.

[0302] In the bispecific single chain antibody molecule of the invention the binding domains are arranged in the order VL-VH-VH-VL, VL-VH-VL-VH, VH-VL-VH-VL or VH-VL-VL-VH, as exemplified in the appended examples. Preferably, the binding domains are arranged in the order VH EpCAM-VL EpCAM-VH CD3-VL CD3 or VL EpCAM-VH EpCAM-VH CD3-VL CD3. More preferably, the binding domains are arranged in the order VL EpCAM-VH EpCAM-VH CD3-VL CD3.

[0303] A particularly preferred embodiment of the invention concerns an above characterized polypeptide, wherein the bispecific single chain antibody molecule comprises a sequence selected from:
[0304] (a) an amino acid sequence as depicted in any of SEQ ID NOs. 944, 948, 946, 960, 972, 984, 996, 1008, 1032, 1044, 1056, 1078, 1090, 1102, 1114, 1126, 1020, or 1776;
[0305] (b) an amino acid sequence encoded by a nucleic acid sequence as depicted in any of SEQ ID NOs: 945, 949, 947, 961, 973, 985, 979, 1009, 1033, 1045, 1057, 1079, 1091, 1103, 1115, 1127, 1021, or 1777; and
[0306] (c) an amino acid sequence at least 90% identical, more preferred at least 95% identical, most preferred at least 96% identical to the amino acid sequence of (a) or (b).

[0307] The invention relates to a bispecific single chain antibody molecule comprising an amino acid sequence as depicted in any of SEQ ID NOs: 944, 948, 946, 960, 972, 984, 996, 1008, 1032, 1044, 1056, 1078, 1090, 1102, 1114, 1126, 1020, or 1776, as well as to an amino acid sequences at least 85% identical, preferably 90%, more preferred at least 95% identical, most preferred at least 96, 97, 98, or 99% identical to the amino acid sequence of SEQ ID NOs: 944, 948, 946, 960, 972, 984, 996, 1008, 1032, 1044, 1056, 1078, 1090, 1102, 1114, 1126, 1020, or 1776. The invention relates also to the corresponding nucleic acid sequences as depicted in any of SEQ ID NOs: 945, 949, 947, 961, 973, 985, 979, 1009, 1033, 1045, 1057, 1079, 1091, 1103, 1115, 1127, 1021, or 1777 as well as to nucleic acid sequences at least 85% identical, preferably 90%, more preferred at least 95% identical, most preferred at least 96, 97, 98, or 99% identical to the nucleic acid sequences shown in SEQ ID NOs: 945, 949, 947, 961, 973, 985, 979, 1009, 1033, 1045, 1057, 1079, 1091, 1103, 1115, 1127, 1021, or 1777. It is to be understood that the sequence identity is determined over the entire nucleotide or amino acid sequence. For sequence alignments, for example, the programs Gap or BestFit can be used (Needleman and Wunsch J. Mol. Biol. 48 (1970), 443-453; Smith and Waterman, Adv. Appl. Math 2 (1981), 482-489), which is contained in the GCG software package (Genetics Computer Group, 575 Science Drive, Madison, Wis., USA 53711 (1991). It is a routine method for those skilled in the art to determine and identify a nucleotide or amino acid sequence having e.g. 85% (90%, 95%, 96%, 97%, 98% or 99%) sequence identity to the nucleotide or amino acid sequences of the bispecific single single chain antibody of the invention. For example, according to Crick's Wobble hypothesis, the 5′ base on the anti-codon is not as spatially confined as the other two bases, and could thus have non-standard base pairing. Put in other words: the third position in a codon triplet may vary so that two triplets which differ in this third position may encode the same amino acid residue. Said hypothesis is well known to the person skilled in the art (see e.g. http://en.wikipedia.org/wiki/Wobble_Hypothesis; Crick, J Mol Biol 19 (1966): 548-55).

[0308] Preferred domain arrangements in the EpCAM×CD3 bispecific single chain antibody constructs of the invention are shown in the following examples.

[0309] In a preferred embodiment of the invention, the bispecific single chain antibodies are cross-species specific for CD3 epsilon and for the human and non-chimpanzee primate cell surface antigen EpCAM recognized by their second binding domain.

### FAPα×CD3

[0310] According to a preferred embodiment of the invention an above characterized bispecific single chain antibody molecule comprises a group of the following sequences as CDR H1, CDR H2, CDR H3, CDR L1, CDR L2 and CDR L3 in the second binding domain selected from:
[0311] CDR H1-3 of SEQ ID NO: 1137-1139 and CDR L1-3 of SEQ ID NO: 1132-1134.

[0312] The sequences of the corresponding VL- and VH-regions of the second binding domain of the bispecific single chain antibody molecule of the invention as well as of the respective scFvs are shown in the sequence listing.

[0313] According to a preferred embodiment of the invention an above characterized bispecific single chain antibody molecule comprises a group of the following sequences as CDR H1, CDR H2, CDR H3, CDR L1, CDR L2 and CDR L3 in the second binding domain selected from the group consisting of:
[0314] a) CDR H1-3 of SEQ ID NO: 1137-1139 and CDR L1-3 of SEQ ID NO: 1132-1134;
[0315] b) CDR H1-3 of SEQ ID NO: 1849-1851 and CDR L1-3 of SEQ ID NO: 1854-1856;
[0316] c) CDR H1-3 of SEQ ID NO: 1835-1837 and CDR L1-3 of SEQ ID NO: 1840-1842; and
[0317] d) CDR H1-3 of SEQ ID NO: 1779-1781 and CDR L1-3 of SEQ ID NO: 1784-1786;
[0318] e) CDR H1-3 of SEQ ID NO: 1793-1795 and CDR L1-3 of SEQ ID NO: 1798-1800;
[0319] f) CDR H1-3 of SEQ ID NO: 1863-1865 and CDR L1-3 of SEQ ID NO: 1868-1870;
[0320] g) CDR H1-3 of SEQ ID NO: 1807-1809 and CDR L1-3 of SEQ ID NO: 1812-1814;
[0321] h) CDR H1-3 of SEQ ID NO: 1821-1823 and CDR L1-3 of SEQ ID NO: 1826-1828;
[0322] i) CDR H1-3 of SEQ ID NO: 1891-1893 and CDR L1-3 of SEQ ID NO: 1896-1898;
[0323] j) CDR H1-3 of SEQ ID NO: 1877-1879 and CDR L1-3 of SEQ ID NO: 1882-1884;
[0324] k) CDR H1-3 of SEQ ID NO: 1961-1963 and CDR L1-3 of SEQ ID NO: 1966-1968;
[0325] l) CDR H1-3 of SEQ ID NO: 1947-1949 and CDR L1-3 of SEQ ID NO: 1952-1954;
[0326] m) CDR H1-3 of SEQ ID NO: 1975-1977 and CDR L1-3 of SEQ ID NO: 1980-1982;
[0327] n) CDR H1-3 of SEQ ID NO: 1933-1935 and CDR L1-3 of SEQ ID NO: 1938-1940;
[0328] o) CDR H1-3 of SEQ ID NO: 1919-1921 and CDR L1-3 of SEQ ID NO: 1924-1926; and
[0329] p) CDR H1-3 of SEQ ID NO: 1905-1907 and CDR L1-3 of SEQ ID NO: 1910-1912.

[0330] In the bispecific single chain antibody molecule of the invention the binding domains are arranged in the order VL-VH-VH-VL, VL-VH-VL-VH, VH-VL-VH-VL or VH-VL-VL-VH, as exemplified in the appended examples. Preferably, the binding domains are arranged in the order VH FAP alpha-VL FAP alpha-VH CD3-VL CD3 or VL FAP alpha-VH FAP alpha-VH CD3-VL CD3. More preferred, the binding domains are arranged in the order VL FAP alpha-VH FAP alpha-VH CD3-VL CD3.

[0331] A particularly preferred embodiment of the invention concerns an above characterized polypeptide, wherein the bispecific single chain antibody molecule comprises a sequence selected from:
[0332] (a) an amino acid sequence as depicted in any of SEQ ID NOs. 1143, 1147, 1145, 1860, 1846, 1790, 1804, 1874, 1818, or 1832;
[0333] (b) an amino acid sequence encoded by a nucleic acid sequence as depicted in any of SEQ ID NOs: 1144, 1148, 1146, 1861, 1847, 1791, 1805, 1875, 1818 or 1833; and
[0334] (c) an amino acid sequence at least 90% identical, more preferred at least 95% identical, most preferred at least 96% identical to the amino acid sequence of (a) or (b).

[0335] The invention relates to a bispecific single chain antibody molecule comprising an amino acid sequence as depicted in any of SEQ ID NOs: 1143, 1147, 1145, 1860, 1846, 1790, 1804, 1874, 1818, or 1832, as well as to an amino acid sequences at least 85% identical, preferably 90%, more preferred at least 95% identical, most preferred at least 96, 97, 98, or 99% identical to the amino acid sequence of SEQ ID NOs: 1143, 1147, 1145, 1860, 1846, 1790, 1804, 1874, 1818, or 1832. The invention relates also to the corresponding nucleic acid sequences as depicted in any of SEQ ID NOs: 1144, 1148, 1146, 1861, 1847, 1791, 1805, 1875, 1818 or 1833, as well as to nucleic acid sequences at least 85% identical, preferably 90%, more preferred at least 95% identical, most preferred at least 96, 97, 98, or 99% identical to the nucleic acid sequences shown in SEQ ID NOs: 1144, 1148, 1146, 1861, 1847, 1791, 1805, 1875, 1818 or 1833. It is to be understood that the sequence identity is determined over the entire nucleotide or amino acid sequence. For sequence alignments, for example, the programs Gap or BestFit can be used (Needleman and Wunsch J. Mol. Biol. 48 (1970), 443-453; Smith and Waterman, Adv. Appl. Math 2 (1981), 482-489), which is contained in the GCG software package (Genetics Computer Group, 575 Science Drive, Madison, Wis., USA 53711 (1991). It is a routine method for those skilled in the art to determine and identify a nucleotide or amino acid sequence having e.g. 85% (90%, 95%, 96%, 97%, 98% or 99%) sequence identity to the nucleotide or amino acid sequences of the bispecific single single chain antibody of the invention. For example, according to Crick's Wobble hypothesis, the 5′ base on the anti-codon is not as spatially confined as the other two bases, and could thus have non-standard base pairing. Put in other words: the third position in a codon triplet may vary so that two triplets which differ in this third position may encode the same amino acid residue. Said hypothesis is well known to the person skilled in the art (see e.g. http://en.wikipedia.org/wiki/Wobble_Hypothesis; Crick, J Mol Biol 19 (1966): 548-55).

[0336] Preferred domain arrangements in the FAPalpha×CD3 bispecific single chain antibody constructs of the invention are shown in the following examples.

[0337] In a preferred embodiment of the invention, the bispecific single chain antibodies are cross-species specific for CD3 epsilon and for the human and non-chimpanzee primate cell surface antigen FAP alpha recognized by their second binding domain.

### IGF-1R×CD3

[0338] According to a preferred embodiment of the invention an above characterized bispecific single chain antibody molecule comprises a group of the following sequences as CDR H1, CDR H2, CDR H3, CDR L1, CDR L2 and CDR L3 in the second binding domain selected from the group consisting of:
[0339] a) CDR H1-3 of SEQ ID NO: 2016-2018 and CDR L1-3 of SEQ ID NO: 2021-2023;
[0340] b) CDR H1-3 of SEQ ID NO: 2030-2032 and CDR L1-3 of SEQ ID NO: 2035-2037;
[0341] c) CDR H1-3 of SEQ ID NO: 2044-2046 and CDR L1-3 of SEQ ID NO: 2049-2051; and
[0342] d) CDR H1-3 of SEQ ID NO: 2058-2060 and CDR L1-3 of SEQ ID NO: 2063-2065;
[0343] e) CDR H1-3 of SEQ ID NO: 2072-2074 and CDR L1-3 of SEQ ID NO: 2077-2079;
[0344] f) CDR H1-3 of SEQ ID NO: 2086-2088 and CDR L1-3 of SEQ ID NO: 2091-2093;
[0345] g) CDR H1-3 of SEQ ID NO: 2100-2102 and CDR L1-3 of SEQ ID NO: 2105-2107;
[0346] h) CDR H1-3 of SEQ ID NO: 2114-2116 and CDR L1-3 of SEQ ID NO: 2119-2121;
[0347] i) CDR H1-3 of SEQ ID NO: 2128-2130 and CDR L1-3 of SEQ ID NO: 2133-2135;
[0348] j) CDR H1-3 of SEQ ID NO: 2142-2144 and CDR L1-3 of SEQ ID NO: 2147-2149:
[0349] k) CDR H1-3 of SEQ ID NO: 2156-2158 and CDR L1-3 of SEQ ID NO: 2161-2163;
[0350] l) CDR H1-3 of SEQ ID NO: 2170-2172 and CDR L1-3 of SEQ ID NO: 2175-2177;
[0351] m) CDR H1-3 of SEQ ID NO: 2184-2186 and CDR L1-3 of SEQ ID NO: 2189-2191;
[0352] n) CDR H1-3 of SEQ ID NO: 2198-2200 and CDR L1-3 of SEQ ID NO: 2203-2205; and
[0353] o) CDR H1-3 of SEQ ID NO: 2212-2214 and CDR L1-3 of SEQ ID NO: 2217-2219.

[0354] The sequences of the corresponding VL- and VH-regions of the second binding domain of the bispecific single chain antibody molecule of the invention as well as of the respective scFvs are shown in the sequence listing.

[0355] In the bispecific single chain antibody molecule of the invention the binding domains are arranged in the order VL-VH-VH-VL, VL-VH-VL-VH, VH-VL-VH-VL or VH-VL-VL-VH, as exemplified in the appended examples. Preferably, the binding domains are arranged in the order VH IGF-1R-VL IGF-1R-VH CD3-VL CD3 or VL IGF-1R-VH IGF-1R-VH CD3-VL CD3.

[0356] A particularly preferred embodiment of the invention concerns an above characterized polypeptide, wherein the bispecific single chain antibody molecule comprises a sequence selected from:
[0357] (a) an amino acid sequence as depicted in any of SEQ ID NOs: 2027, 2041, 2055, 2069, 2083, 2097, 2111, 2125, 2139, 2153, 2167, 2181, 2195, 2209, or 2223;
[0358] (b) an amino acid sequence encoded by a nucleic acid sequence as depicted in any of SEQ ID NOs: 2028, 2042, 2056, 2070, 2084, 2098, 2112, 2126, 2140, 2154, 2168, 2182, 2196, 2210, or 2224; and
[0359] (c) an amino acid sequence at least 90% identical, more preferred at least 95% identical, most preferred at least 96% identical to the amino acid sequence of (a) or (b).

[0360] The invention relates to a bispecific single chain antibody molecule comprising an amino acid sequence as depicted in any of SEQ ID NOs: 2027, 2041, 2055, 2069, 2083, 2097, 2111, 2125, 2139, 2153, 2167, 2181, 2195, 2209, or 2223, as well as to an amino acid sequences at least 85% identical, preferably 90%, more preferred at least 95% identical, most preferred at least 96, 97, 98, or 99% identical to the amino acid sequence of SEQ ID NOs: 2027, 2041, 2055, 2069, 2083, 2097, 2111, 2125, 2139, 2153, 2167, 2181, 2195, 2209, or 2223. The invention relates also to the corresponding nucleic acid sequences as depicted in any of SEQ ID NOs: 2028, 2042, 2056, 2070, 2084, 2098, 2112, 2126, 2140, 2154, 2168, 2182, 2196, 2210, or 2224 as well as to nucleic acid sequences at least 85% identical, preferably 90%, more preferred at least 95% identical, most preferred at least 96, 97, 98, or 99% identical to the nucleic acid sequences shown in SEQ ID NOs: 2028, 2042, 2056, 2070, 2084, 2098, 2112, 2126, 2140, 2154, 2168, 2182, 2196, 2210, or 2224. It is to be understood that the sequence identity is determined over the entire nucleotide or amino acid sequence. For sequence alignments, for example, the programs Gap or BestFit can be used (Needleman and Wunsch J. Mol. Biol. 48 (1970), 443-453; Smith and Waterman, Adv. Appl. Math 2 (1981), 482-489), which is contained in the GCG software package (Genetics Computer Group, 575 Science Drive, Madison, Wis., USA 53711 (1991). It is a routine method for those skilled in the art to determine and identify a nucleotide or amino acid sequence having e.g. 85% (90%, 95%, 96%, 97%, 98% or 99%) sequence identity to the nucleotide or amino acid sequences of the bispecific single chain antibody of the invention. For example, according to Crick's Wobble hypothesis, the 5′ base on the anti-codon is not as spatially confined as the other two bases, and could thus have non-standard base pairing. Put in other words: the third position in a codon triplet may vary so that two triplets which differ in this third position may encode the same amino acid residue. Said hypothesis is well known to the person skilled in the art (see e.g. http://en.wikipedia.org/wiki/Wobble_Hypothesis; Crick, J Mol Biol 19 (1966): 548-55).

[0361] Preferred domain arrangements in the IGF-1R×CD3 bispecific single chain antibody constructs of the invention are shown in the following examples.

[0362] In a preferred embodiment of the invention, the bispecific single chain antibodies are cross-species specific for CD3 epsilon and for the human and non-chimpanzee primate cell surface antigen IGF-1R recognized by their second binding domain.

[0363] In an alternative embodiment the present invention provides a nucleic acid sequence encoding an above described bispecific single chain antibody molecule of the invention.

[0364] The present invention also relates to a vector comprising the nucleic acid molecule of the present invention.

[0365] Many suitable vectors are known to those skilled in molecular biology, the choice of which would depend on the function desired and include plasmids, cosmids, viruses, bacteriophages and other vectors used conventionally in genetic engineering. Methods which are well known to those skilled in the art can be used to construct various plasmids and vectors; see, for example, the techniques described in Sambrook et al. (loc cit.) and Ausubel, Current Protocols in Molecular Biology, Green Publishing Associates and Wiley Interscience, N.Y. (1989), (1994). Alternatively, the polynucleotides and vectors of the invention can be reconstituted into liposomes for delivery to target cells. As discussed in further details below, a cloning vector was used to isolate individual sequences of DNA. Relevant sequences can be transferred into expression vectors where expression of a particular polypeptide is required. Typical cloning vectors include pBluescript SK, pGEM, pUC9, pBR322 and pGBT9. Typical expression vectors include pTRE, pCAL-n-EK, pESP-1, pOP13CAT.

[0366] Preferably said vector comprises a nucleic acid sequence which is a regulatory sequence operably linked to said nucleic acid sequence defined herein.

[0367] The term “regulatory sequence” refers to DNA sequences, which are necessary to effect the expression of coding sequences to which they are ligated. The nature of such control sequences differs depending upon the host organism. In prokaryotes, control sequences generally include promoter, ribosomal binding site, and terminators. In eukaryotes generally control sequences include promoters, terminators and, in some instances, enhancers, transactivators or transcription factors. The term “control sequence” is intended to include, at a minimum, all components the presence of which are necessary for expression, and may also include additional advantageous components.

[0368] The term “operably linked” refers to a juxtaposition wherein the components so described are in a relationship permitting them to function in their intended manner. A control sequence “operably linked” to a coding sequence is ligated in such a way that expression of the coding sequence is achieved under conditions compatible with the control sequences. In case the control sequence is a promoter, it is obvious for a skilled person that double-stranded nucleic acid is preferably used.

[0369] Thus, the recited vector is preferably an expression vector. An “expression vector” is a construct that can be used to transform a selected host and provides for expression of a coding sequence in the selected host. Expression vectors can for instance be cloning vectors, binary vectors or integrating vectors. Expression comprises transcription of the nucleic acid molecule preferably into a translatable mRNA. Regulatory elements ensuring expression in prokaryotes and/or eukaryotic cells are well known to those skilled in the art. In the case of eukaryotic cells they comprise normally promoters ensuring initiation of transcription and optionally poly-A signals ensuring termination of transcription and stabilization of the transcript. Possible regulatory elements permitting expression in prokaryotic host cells comprise, e.g., the P_{L}, lac, trp or tac promoter in E. coli, and examples of regulatory elements permitting expression in eukaryotic host cells are the AOX1 or GAL1 promoter in yeast or the CMV-, SV40-, RSV-promoter (Rous sarcoma virus), CMV-enhancer, SV40-enhancer or a globin intron in mammalian and other animal cells.

[0370] Beside elements, which are responsible for the initiation of transcription such regulatory elements may also comprise transcription termination signals, such as the SV40-poly-A site or the t k-poly-A site, downstream of the polynucleotide. Furthermore, depending on the expression system used leader sequences capable of directing the polypeptide to a cellular compartment or secreting it into the medium may be added to the coding sequence of the recited nucleic acid sequence and are well known in the art; see also the appended Examples. The leader sequence(s) is (are) assembled in appropriate phase with translation, initiation and termination sequences, and preferably, a leader sequence capable of directing secretion of translated protein, or a portion thereof, into the periplasmic space or extracellular medium. Optionally, the heterologous sequence can encode a fusion protein including an N-terminal identification peptide imparting desired characteristics, e.g., stabilization or simplified purification of expressed recombinant product; see supra. In this context, suitable expression vectors are known in the art such as Okayama-Berg cDNA expression vector pcDV1 (Pharmacia), pCDM8, pRc/CMV, pcDNA1, pcDNA3 (In-vitrogene), pEF-DHFR, pEF-ADA or pEF-neo (Mack et al. PNAS (1995) 92, 7021-7025 and Raum et al. Cancer Immunol Immunother (2001) 50(3), 141-150) or pSPORT1 (GIBCO BRL).

[0371] Preferably, the expression control sequences will be eukaryotic promoter systems in vectors capable of transforming of transfecting eukaryotic host cells, but control sequences for prokaryotic hosts may also be used. Once the vector has been incorporated into the appropriate host, the host is maintained under conditions suitable for high level expression of the nucleotide sequences, and as desired, the collection and purification of the bispecific single chain antibody molecule of the invention may follow; see, e.g., the appended examples.

[0372] An alternative expression system, which can be used to express a cell cycle interacting protein is an insect system. In one such system, Autographa californica nuclear polyhedrosis virus (AcNPV) is used as a vector to express foreign genes in Spodoptera frugiperda cells or in Trichoplusia larvae. The coding sequence of a recited nucleic acid molecule may be cloned into a nonessential region of the virus, such as the polyhedrin gene, and placed under control of the polyhedrin promoter. Successful insertion of said coding sequence will render the polyhedrin gene inactive and produce recombinant virus lacking coat protein coat. The recombinant viruses are then used to infect S. frugiperda cells or Trichoplusia larvae in which the protein of the invention is expressed (Smith, J. Virol. 46 (1983), 584; Engelhard, Proc. Nat. Acad. Sci. USA 91 (1994), 3224-3227).

[0373] Additional regulatory elements may include transcriptional as well as translational enhancers. Advantageously, the above-described vectors of the invention comprise a selectable and/or scorable marker.

[0374] Selectable marker genes useful for the selection of transformed cells and, e.g., plant tissue and plants are well known to those skilled in the art and comprise, for example, antimetabolite resistance as the basis of selection for dhfr, which confers resistance to methotrexate (Reiss, Plant Physiol. (Life Sci. Adv.) 13 (1994), 143-149); npt, which confers resistance to the aminoglycosides neomycin, kanamycin and paromycin (Herrera-Estrella, EMBO J. 2 (1983), 987-995) and hygro, which confers resistance to hygromycin (Marsh, Gene 32 (1984), 481-485). Additional selectable genes have been described, namely trpB, which allows cells to utilize indole in place of tryptophan; hisD, which allows cells to utilize histinol in place of histidine (Hartman, Proc. Natl. Acad. Sci. USA 85 (1988), 8047); mannose-6-phosphate isomerase which allows cells to utilize mannose (WO 94/20627) and ODC (ornithine decarboxylase) which confers resistance to the ornithine decarboxylase inhibitor, 2-(difluoromethyl)-DL-ornithine, DFMO (McConlogue, 1987, In: Current Communications in Molecular Biology, Cold Spring Harbor Laboratory ed.) or deaminase from Aspergillus terreus which confers resistance to Blasticidin S (Tamura, Biosci. Biotechnol. Biochem. 59 (1995), 2336-2338).

[0375] Useful scorable markers are also known to those skilled in the art and are commercially available. Advantageously, said marker is a gene encoding luciferase (Giacomin, Pl. Sci. 116 (1996), 59-72; Scikantha, J. Bact. 178 (1996), 121), green fluorescent protein (Gerdes, FEBS Lett. 389 (1996), 44-47) or β-glucuronidase (Jefferson, EMBO J. 6 (1987), 3901-3907). This embodiment is particularly useful for simple and rapid screening of cells, tissues and organisms containing a recited vector.

[0376] As described above, the recited nucleic acid molecule can be used alone or as part of a vector to express the bispecific single chain antibody molecule of the invention in cells, for, e.g., purification but also for gene therapy purposes. The nucleic acid molecules or vectors containing the DNA sequence(s) encoding any one of the above described bispecific single chain antibody molecule of the invention is introduced into the cells which in turn produce the polypeptide of interest. Gene therapy, which is based on introducing therapeutic genes into cells by ex-vivo or in-vivo techniques is one of the most important applications of gene transfer. Suitable vectors, methods or gene-delivery systems for in-vitro or in-vivo gene therapy are described in the literature and are known to the person skilled in the art; see, e.g., Giordano, Nature Medicine 2 (1996), 534-539; Schaper, Circ. Res. 79 (1996), 911-919; Anderson, Science 256 (1992), 808-813; Verma, Nature 389 (1994), 239; Isner, Lancet 348 (1996), 370-374; Muhlhauser, Circ. Res. 77 (1995), 1077-1086; Onodera, Blood 91 (1998), 30-36; Verma, Gene Ther. 5 (1998), 692-699; Nabel, Ann. N.Y. Acad. Sci. 811 (1997), 289-292; Verzeletti, Hum. Gene Ther. 9 (1998), 2243-51; Wang, Nature Medicine 2 (1996), 714-716; WO 94/29469; WO 97/00957, U.S. Pat. Nos. 5,580,859; 5,589,466; or Schaper, Current Opinion in Biotechnology 7 (1996), 635-640; dos Santos Coura and Nardi Virol J. (2007), 4:99. The recited nucleic acid molecules and vectors may be designed for direct introduction or for introduction via liposomes, or viral vectors (e.g., adenoviral, retroviral) into the cell. Preferably, said cell is a germ line cell, embryonic cell, or egg cell or derived there from, most preferably said cell is a stem cell. An example for an embryonic stem cell can be, inter alia, a stem cell as described in Nagy, Proc. Natl. Acad. Sci. USA 90 (1993), 8424-8428.

[0377] The invention also provides for a host transformed or transfected with a vector of the invention. Said host may be produced by introducing the above described vector of the invention or the above described nucleic acid molecule of the invention into the host. The presence of at least one vector or at least one nucleic acid molecule in the host may mediate the expression of a gene encoding the above described single chain antibody constructs.

[0378] The described nucleic acid molecule or vector of the invention, which is introduced in the host may either integrate into the genome of the host or it may be maintained extrachromosomally.

[0379] The host can be any prokaryote or eukaryotic cell.

[0380] The term “prokaryote” is meant to include all bacteria, which can be transformed or transfected with DNA or RNA molecules for the expression of a protein of the invention. Prokaryotic hosts may include gram negative as well as gram positive bacteria such as, for example, E. coli, S. typhimurium, Serratia marcescens and Bacillus subtilis. The term “eukaryotic” is meant to include yeast, higher plant, insect and preferably mammalian cells. Depending upon the host employed in a recombinant production procedure, the protein encoded by the polynucleotide of the present invention may be glycosylated or may be non-glycosylated. Especially preferred is the use of a plasmid or a virus containing the coding sequence of the bispecific single chain antibody molecule of the invention and genetically fused thereto an N-terminal FLAG-tag and/or C-terminal His-tag. Preferably, the length of said FLAG-tag is about 4 to 8 amino acids, most preferably 8 amino acids. An above described polynucleotide can be used to transform or transfect the host using any of the techniques commonly known to those of ordinary skill in the art. Furthermore, methods for preparing fused, operably linked genes and expressing them in, e.g., mammalian cells and bacteria are well-known in the art (Sambrook, loc cit.).

[0381] Preferably, said the host is a bacterium or an insect, fungal, plant or animal cell.

[0382] It is particularly envisaged that the recited host may be a mammalian cell. Particularly preferred host cells comprise CHO cells, COS cells, myeloma cell lines like SP2/0 or NS/0. As illustrated in the appended examples, particularly preferred are CHO-cells as hosts.

[0383] More preferably said host cell is a human cell or human cell line, e.g. per.c6 (Kroos, Biotechnol. Prog., 2003, 19:163-168).

[0384] In a further embodiment, the present invention thus relates to a process for the production of a bispecific single chain antibody molecule of the invention, said process comprising culturing a host of the invention under conditions allowing the expression of the bispecific single chain antibody molecule of the invention and recovering the produced polypeptide from the culture.

[0385] The transformed hosts can be grown in fermentors and cultured according to techniques known in the art to achieve optimal cell growth. The bispecific single chain antibody molecule of the invention can then be isolated from the growth medium, cellular lysates, or cellular membrane fractions. The isolation and purification of the, e.g., microbially expressed bispecific single chain antibody molecules may be by any conventional means such as, for example, preparative chromatographic separations and immunological separations such as those involving the use of monoclonal or polyclonal antibodies directed, e.g., against a tag of the bispecific single chain antibody molecule of the invention or as described in the appended examples.

[0386] The conditions for the culturing of a host, which allow the expression are known in the art to depend on the host system and the expression system/vector used in such process. The parameters to be modified in order to achieve conditions allowing the expression of a recombinant polypeptide are known in the art. Thus, suitable conditions can be determined by the person skilled in the art in the absence of further inventive input.

[0387] Once expressed, the bispecific single chain antibody molecule of the invention can be purified according to standard procedures of the art, including ammonium sulfate precipitation, affinity columns, column chromatography, gel electrophoresis and the like; see, Scopes, “Protein Purification”, Springer-Verlag, N.Y. (1982). Substantially pure polypeptides of at least about 90 to 95% homogeneity are preferred, and 98 to 99% or more homogeneity are most preferred, for pharmaceutical uses. Once purified, partially or to homogeneity as desired, the bispecific single chain antibody molecule of the invention may then be used therapeutically (including extracorporeally) or in developing and performing assay procedures. Furthermore, examples for methods for the recovery of the bispecific single chain antibody molecule of the invention from a culture are described in detail in the appended examples. The recovery can also be achieved by a method for the isolation of the bispecific single chain antibody molecule of the invention capable of binding to an epitope of human and non-chimpanzee primate CD3 epsilon (CD3_{E}, the method comprising the steps of:

(a) contacting the polypeptide(s) with an N-terminal fragment of the extracellular domain of CD3ε of maximal 27 amino acids comprising the amino acid sequence Gln-Asp-Gly-Asn-Glu-Glu-Met-Gly (SEQ ID NO. 341) or Gln-Asp-Gly-Asn-Glu-Glu-Ile-Gly (SEQ ID NO. 342), fixed via its C-terminus to a solid phase;
(b) eluting the bound polypeptide(s) from said fragment; and
(c) isolating the polypeptide(s) from the eluate of (b).

[0388] It is preferred that the polypeptide(s) isolated by the above method of the invention are human.

[0389] This method or the isolation of the bispecific single chain antibody molecule of the invention is understood as a method for the isolation of one or more different polypeptides with the same specificity for the fragment of the extracellular domain of CD3ε comprising at its N-terminus the amino acid sequence Gln-Asp-Gly-Asn-Glu-Glu-Met-Gly (SEQ ID NO. 341) or Gln-Asp-Gly-Asn-Glu-Glu-Ile-Gly (SEQ ID NO. 342) from a plurality of polypeptide candidates as well as a method for the purification of a polypeptide from a solution. A non-limiting example for the latter method for the purification of a bispecific single chain antibody molecule from a solution is e.g. the purification of a recombinantly expressed bispecific single chain antibody molecule from a culture supernatant or a preparation from such culture.

[0390] As stated above the fragment used in this method is an N-terminal fragment of the extracellular domain of the primate CD3ε molecule. The amino acid sequence of the extracellular domain of the CD3ε molecule of different species is depicted in SEQ ID NOs: 1, 3, 5 and 7. The two forms of the N-terminal octamer are depicted in SEQ ID NOs: 341 and 342. It is preferred that this N-terminus is freely available for binding of the polypeptides to be identified by the method of the invention. The term “freely available” is understood in the context of the invention as free of additional motives such as a His-tag. The interference of such a His-tag with a binding molecule identified by the method of the invention is described in the appended Examples 6 and 20.

[0391] According to this method said fragment is fixed via its C-terminus to a solid phase. The person skilled in the art will easily and without any inventive ado elect a suitable solid phase support dependent from the used embodiment of the method of the invention. Examples for a solid support comprise but are not limited to matrices like beads (e.g. agarose beads, sepharose beads, polystyrol beads, dextran beads), plates (culture plates or MultiWell plates) as well as chips known e.g. from Biacore®. The selection of the means and methods for the fixation/immobilization of the fragment to said solid support depend on the election of the solid support. A commonly used method for the fixation/immobilization is a coupling via an N-hydroxysuccinimide (NHS) ester. The chemistry underlying this coupling as well as alternative methods for the fixation/immobilization are known to the person skilled in the art, e.g. from Hermanson “Bioconjugate Techniques”, Academic Press, Inc. (1996). For the fixation to/immobilization on chromatographic supports the following means are commonly used: NHS-activated sepharose (e.g. HiTrap-NHS of GE Life Science-Amersham), CnBr-activated sepharose (e.g. GE Life Science-Amersham), NHS-activated dextran beads (Sigma) or activated polymethacrylate. These reagents may also be used in a batch approach. Moreover, dextran beads comprising iron oxide (e.g. available from Miltenyi) may be used in a batch approach. These beads may be used in combination with a magnet for the separation of the beads from a solution. Polypeptides can be immobilized on a Biacore chip (e.g. CM5 chips) by the use of NHS activated carboxymethyldextran. Further examples for an appropriate solid support are amine reactive MultiWell plates (e.g. Nunc Immobilizer™ plates). According to this method said fragment of the extracellular domain of CD3 epsilon can be directly coupled to the solid support or via a stretch of amino acids, which might be a linker or another protein/polypeptide moiety. Alternatively, the extracellular domain of CD3 epsilon can be indirectly coupled via one or more adaptor molecule(s).

[0392] Means and methods for the eluation of a peptide or polypeptide bound to an immobilized epitope are well known in the art. The same holds true for methods for the isolation of the identified polypeptide(s) from the eluate.

[0393] A method for the isolation of one or more different bispecific single chain antibody molecule(s) with the same specificity for the fragment of the extracellular domain of CD3ε comprising at its N-terminus the amino acid sequence Gln-Asp-Gly-Asn-Glu-Glu-X-Gly (with X being Met or Ile) from a plurality of polypeptide candidates may comprise one or more steps of the following methods for the selection of antigen-specific entities:

[0394] CD3ε specific binding domains can be selected from antibody derived repertoires. A phage display library can be constructed based on standard procedures, as for example disclosed in “Phage Display: A Laboratory Manual”; Ed. Barbas, Burton, Scott & Silverman; Cold Spring Harbor Laboratory Press, 2001. The format of the antibody fragments in the antibody library can be scFv, but may generally also be a Fab fragment or even a single domain antibody fragment. For the isolation of antibody fragments naïve antibody fragment libraries may be used. For the selection of potentially low immunogenic binding entities in later therapeutic use, human antibody fragment libraries may be favourable for the direct selection of human antibody fragments. In some cases they may form the basis for synthetic antibody libraries (Knappik et al. J Mol. Biol. 2000, 296:57 ff). The corresponding format may be Fab, scFv (as described below) or domain antibodies (dAbs, as reviewed in Holt et al., Trends Biotechnol. 2003, 21:484 ff).

[0395] It is also known in the art that in many cases there is no immune human antibody source available against the target antigen. Therefore animals are immunized with the target antigen and the respective antibody libraries isolated from animal tissue as e.g. spleen or PBMCs. The N-terminal fragment may be biotinylated or covalently linked to proteins like KLH or bovine serum albumin (BSA). According to common approaches rodents are used for immunization. Some immune antibody repertoires of non-human origin may be especially favourable for other reasons, e.g. for the presence of single domain antibodies (VHH) derived from cameloid species (as described in Muyldermans, J Biotechnol. 74:277; De Genst et al. Dev Como Immunol. 2006, 30:187 ff). Therefore a corresponding format of the antibody library may be Fab, scFv (as described below) or single domain antibodies (VHH).

[0396] In one possible approach ten weeks old F1 mice from balb/c×C57 black crossings can be immunized with whole cells e.g. expressing transmembrane EpCAM N-terminally displaying as translational fusion the N-terminal amino acids 1 to 27 of the mature CD3ε chain. Alternatively, mice can be immunized with 1-27 CD3 epsilon-Fc fusion protein (a corresponding approach is described in the appended Example 2). After booster immunization(s), blood samples can be taken and antibody serum titer against the CD3-positive T cells can be tested e.g. in FACS analysis. Usually, serum titers are significantly higher in immunized than in non-immunized animals.

[0397] Immunized animals may form the basis for the construction of immune antibody libraries. Examples of such libraries comprise phage display libraries. Such libraries may be generally constructed based on standard procedures, as for example disclosed in “Phage Display: A Laboratory Manual”; Ed. Barbas, Burton, Scott & Silverman; Cold Spring Harbor Laboratory Press, 2001.

[0398] The non-human antibodies can also be humanized via phage display due to the generation of more variable antibody libraries that can be subsequently enriched for binders during selection.

[0399] In a phage display approach any one of the pools of phages that displays the antibody libraries forms a basis to select binding entities using the respective antigen as target molecule. The central step in which antigen specific, antigen bound phages are isolated is designated as panning. Due to the display of the antibody fragments on the surface of the phages, this general method is called phage display. One preferred method of selection is the use of small proteins such as the filamentous phage N2 domain translationally fused to the N-terminus of the scFv displayed by the phage. Another display method known in the art, which may be used to isolate binding entities is the ribosome display method (reviewed in Groves & Osbourn, Expert Opin Biol Ther. 2005, 5:125 ff; Lipovsek & Pluckthun, J Immunol Methods 2004, 290:52 ff). In order to demonstrate binding of scFv phage particles to a 1-27 CD3ε-Fc fusion protein a phage library carrying the cloned scFv-repertoire can be harvested from the respective culture supernatant by PEG (polyethyleneglycole). ScFv phage particles may be incubated with immobilized CD3ε Fc fusion protein. The immobilized CD3ε Fc fusion protein may be coated to a solid phase. Binding entities can be eluted and the eluate can be used for infection of fresh uninfected bacterial hosts. Bacterial hosts successfully transduced with a phagemid copy, encoding a human scFv-fragment, can be selected again for carbenicillin resistance and subsequently infected with e.g. VCMS 13 helper phage to start the second round of antibody display and in vitro selection. A total of 4 to 5 rounds of selections is carried out, normally. The binding of isolated binding entities can be tested on CD3 epsilon positive Jurkat cells, HPBall cells, PBMCs or transfected eukaryotic cells that carry the N-terminal CD3ε sequence fused to surface displayed EpCAM using a flow cytometric assay (see appended Example 4).

[0400] Preferably, the above method may be a method, wherein the fragment of the extracellular domain of CD3ε consists of one or more fragments of a polypeptide having an amino acid sequence of any one depicted in SEQ ID NOs. 2, 4, 6 or 8. More preferably, said fragment is 8, 9, 10, 11, 12, 13, 14, 15, 16, 17, 18, 19, 20, 21, 22, 23, 24, 25, 26, or 27 amino acid residues in length.

[0401] This method of identification of a bispecific single chain antibody molecule may be a method of screening a plurality of bispecific single chain antibody molecules comprising a cross-species specific binding domain binding to an epitope of human and non-chimpanzee primate CD3ε. Alternatively, the method of identification is a method of purification/isolation of a bispecific single chain antibody molecule comprising a cross-species specific binding domain binding to an epitope of human and non-chimpanzee primate CD3ε.

[0402] Furthermore, the invention provides for a composition comprising a bispecific single chain antibody molecule of the invention or a bispecific single chain antibody as produced by the process disclosed above. Preferably, said composition is a pharmaceutical composition.

[0403] The invention provides also for a bispecific single chain antibody molecule as defined herein, or produced according to the process as defined herein, wherein said bispecific single chain antibody molecule is for use in the prevention, treatment or amelioration of cancer or autoimmune diseases.

[0404] Preferably for a PSCA×CD3 bispecific single chain antibody molecule, said cancer is prostate cancer, bladder cancer or pancreatic cancer.

[0405] For a CD19×CD3 bispecific single chain antibody molecule it is preferred that said cancer is a B-cell malignancy, such as B-NHL (B cell non-Hodgkin Lymphoma), B-ALL (acute lymphoblastic B cell leukemia), B-CLL (chronic lymphocytic B cell leukemia), or Multiple Myeloma (wherein the bispecific single chain antibody molecule of the invention advantageously depletes CD19-positive cancer stem cells/cancer initiating cells). However, the bispecific single chain antibody molecule is also for use in the prevention, treatment or amelioration of B-cell mediated autoimmune diseases or autoimmune diseases with a pathogenic B cell contribution such as rheumatoid arthritis or the depletion of B-cells.

[0406] For a c-MET×CD3 bispecific single chain antibody molecule it is preferred that said cancer is a carcinoma, sarcoma, glioblastoma/astrocytoma, melanoma, mesothelioma, Wilms tumor or a hematopoietic malignancy such as leukemia, lymphoma or multiple myeloma. A comprehensive list of various cancer types which may be treated with the bispecific single chain antibody can be found e.g. in http://www.vai.org/met/.

[0407] For an Endosialin×CD3 bispecific single chain antibody molecule it is preferred that said cancer includes, but is not limited to, carcinomas (breast, kidney, lung, colorectal, colon, pancreas mesothelioma), sarcomas, and neuroectodermal tumors (melanoma, glioma, neuroblastoma).

[0408] For an EpCAM×CD3 bispecific single chain antibody molecule it is preferred that said cancer is epithelial cancer or a minimal residual cancer.

[0409] For a FAPa×CD3 bispecific single chain antibody molecule it is preferred that said cancer is epithelial cancer.

[0410] For a IGF-1R×CD3 bispecific single chain antibody molecule it is preferred that said cancer is bone or soft tissue cancer (e.g. Ewing sarcoma), breast, liver, lung, head and neck, colorectal, prostate, leiomyosarcoma, cervical and endometrial cancer, ovarian, prostate, and pancreatic cancer. Alternatively, the IGF-1R×CD3 bispecific single chain antibody molecule of the invention is also used in the prevention, treatment or amelioration of autoimmune diseases, preferably psoriasis.

[0411] It is preferred that the bispecific single chain is further comprising suitable formulations of carriers, stabilizers and/or excipients. Moreover, it is preferred that said bispecific single chain antibody molecule is suitable to be administered in combination with an additional drug. Said drug may be a non-proteinaceous compound or a proteinaceous compound and may be administered simultaneously or non-simultaneously with the bispecific single chain antibody molecule as defined herein.

[0412] In accordance with the invention, the term “pharmaceutical composition” relates to a composition for administration to a patient, preferably a human patient. The particular preferred pharmaceutical composition of this invention comprises bispecific single chain antibodies directed against and generated against context-independent CD3 epitopes. Preferably, the pharmaceutical composition comprises suitable formulations of carriers, stabilizers and/or excipients. In a preferred embodiment, the pharmaceutical composition comprises a composition for parenteral, transdermal, intraluminal, intraarterial, intrathecal and/or intranasal administration or by direct injection into tissue. It is in particular envisaged that said composition is administered to a patient via infusion or injection. Administration of the suitable compositions may be effected by different ways, e.g., by intravenous, intraperitoneal, subcutaneous, intramuscular, topical or intradermal administration. In particular, the present invention provides for an uninterrupted administration of the suitable composition. As a non-limiting example, uninterrupted, i.e. continuous administration may be realized by a small pump system worn by the patient for metering the influx of therapeutic agent into the body of the patient. The pharmaceutical composition comprising the bispecific single chain antibodies directed against and generated against context-independent CD3 epitopes of the invention can be administered by using said pump systems. Such pump systems are generally known in the art, and commonly rely on periodic exchange of cartridges containing the therapeutic agent to be infused. When exchanging the cartridge in such a pump system, a temporary interruption of the otherwise uninterrupted flow of therapeutic agent into the body of the patient may ensue. In such a case, the phase of administration prior to cartridge replacement and the phase of administration following cartridge replacement would still be considered within the meaning of the pharmaceutical means and methods of the invention together make up one “uninterrupted administration” of such therapeutic agent.

[0413] The continuous or uninterrupted administration of these bispecific single chain antibodies directed against and generated against context-independent CD3 epitopes of this invention may be intravenuous or subcutaneous by way of a fluid delivery device or small pump system including a fluid driving mechanism for driving fluid out of a reservoir and an actuating mechanism for actuating the driving mechanism. Pump systems for subcutaneous administration may include a needle or a cannula for penetrating the skin of a patient and delivering the suitable composition into the patient's body. Said pump systems may be directly fixed or attached to the skin of the patient independently of a vein, artery or blood vessel, thereby allowing a direct contact between the pump system and the skin of the patient. The pump system can be attached to the skin of the patient for 24 hours up to several days. The pump system may be of small size with a reservoir for small volumes. As a non-limiting example, the volume of the reservoir for the suitable pharmaceutical composition to be administered can be between 0.1 and 50 ml.

[0414] The continuous administration may be transdermal by way of a patch worn on the skin and replaced at intervals. One of skill in the art is aware of patch systems for drug delivery suitable for this purpose. It is of note that transdermal administration is especially amenable to uninterrupted administration, as exchange of a first exhausted patch can advantageously be accomplished simultaneously with the placement of a new, second patch, for example on the surface of the skin immediately adjacent to the first exhausted patch and immediately prior to removal of the first exhausted patch. Issues of flow interruption or power cell failure do not arise.

[0415] The composition of the present invention, comprising in particular bispecific single chain antibodies directed against and generated against context-independent CD3 epitopes may further comprise a pharmaceutically acceptable carrier. Examples of suitable pharmaceutical carriers are well known in the art and include solutions, e.g. phosphate buffered saline solutions, water, emulsions, such as oil/water emulsions, various types of wetting agents, sterile solutions, liposomes, etc. Compositions comprising such carriers can be formulated by well known conventional methods. Formulations can comprise carbohydrates, buffer solutions, amino acids and/or surfactants. Carbohydrates may be non-reducing sugars, preferably trehalose, sucrose, octasulfate, sorbitol or xylitol. Such formulations may be used for continuous administrations which may be intravenuous or subcutaneous with and/or without pump systems. Amino acids may be charged amino acids, preferably lysine, lysine acetate, arginine, glutamate and/or histidine. Surfactants may be detergents, preferably with a molecular weight of >1.2 KD and/or a polyether, preferably with a molecular weight of >3 KD. Non-limiting examples for preferred detergents are Tween 20, Tween 40, Tween 60, Tween 80 or Tween 85. Non-limiting examples for preferred polyethers are PEG 3000, PEG 3350, PEG 4000 or PEG 5000. Buffer systems used in the present invention can have a preferred pH of 5-9 and may comprise citrate, succinate, phosphate, histidine and acetate. The compositions of the present invention can be administered to the subject at a suitable dose which can be determined e.g. by dose escalating studies by administration of increasing doses of the bispecific single chain antibody molecule of the invention exhibiting cross-species specificity described herein to non-chimpanzee primates, for instance macaques. As set forth above, the bispecific single chain antibody molecule of the invention exhibiting cross-species specificity described herein can be advantageously used in identical form in preclinical testing in non-chimpanzee primates and as drug in humans. These compositions can also be administered in combination with other proteinaceous and non-proteinaceous drugs. These drugs may be administered simultaneously with the composition comprising the bispecific single chain antibody molecule of the invention as defined herein or separately before or after administration of said polypeptide in timely defined intervals and doses. The dosage regimen will be determined by the attending physician and clinical factors. As is well known in the medical arts, dosages for any one patient depend upon many factors, including the patient's size, body surface area, age, the particular compound to be administered, sex, time and route of administration, general health, and other drugs being administered concurrently. Preparations for parenteral administration include sterile aqueous or non-aqueous solutions, suspensions, and emulsions. Examples of non-aqueous solvents are propylene glycol, polyethylene glycol, vegetable oils such as olive oil, and injectable organic esters such as ethyl oleate. Aqueous carriers include water, alcoholic/aqueous solutions, emulsions or suspensions, including saline and buffered media. Parenteral vehicles include sodium chloride solution, Ringer's dextrose, dextrose and sodium chloride, lactated Ringer's, or fixed oils. Intravenous vehicles include fluid and nutrient replenishers, electrolyte replenishers (such as those based on Ringer's dextrose), and the like. Preservatives and other additives may also be present such as, for example, antimicrobials, anti-oxidants, chelating agents, inert gases and the like. In addition, the composition of the present invention might comprise proteinaceous carriers, like, e.g., serum albumin or immunoglobulin, preferably of human origin. It is envisaged that the composition of the invention might comprise, in addition to the bispecific single chain antibody molecule of the invention defined herein, further biologically active agents, depending on the intended use of the composition. Such agents might be drugs acting on the gastro-intestinal system, drugs acting as cytostatica, drugs preventing hyperurikemia, drugs inhibiting immunoreactions (e.g. corticosteroids), drugs modulating the inflammatory response, drugs acting on the circulatory system and/or agents such as cytokines known in the art.

[0416] The biological activity of the pharmaceutical composition defined herein can be determined for instance by cytotoxicity assays, as described in the following examples, in WO 99/54440 or by Schlereth et al. (Cancer Immunol. Immunother. 20 (2005), 1-12). “Efficacy” or “in vivo efficacy” as used herein refers to the response to therapy by the pharmaceutical composition of the invention, using e.g. standardized NCI response criteria. The success or in vivo efficacy of the therapy using a pharmaceutical composition of the invention refers to the effectiveness of the composition for its intended purpose, i.e. the ability of the composition to cause its desired effect, i.e. depletion of pathologic cells, e.g. tumor cells. The in vivo efficacy may be monitored by established standard methods for the respective disease entities including, but not limited to white blood cell counts, differentials, Fluorescence Activated Cell Sorting, bone marrow aspiration. In addition, various disease specific clinical chemistry parameters and other established standard methods may be used. Furthermore, computer-aided tomography, X-ray, nuclear magnetic resonance tomography (e.g. for National Cancer Institute-criteria based response assessment [Cheson B D, Horning S J, Coiffier B, Shipp M A, Fisher R I, Connors J M, Lister T A, Vose J, Grillo-Lopez A, Hagenbeek A, Cabanillas F, Klippensten D, Hiddemann W, Castellino R, Harris N L, Armitage J O, Carter W, Hoppe R, Canellos G P. Report of an international workshop to standardize response criteria for non-Hodgkin's lymphomas. NCI Sponsored International Working Group. J Clin Oncol. 1999 April; 17(4):1244]), positron-emission tomography scanning, white blood cell counts, differentials, Fluorescence Activated Cell Sorting, bone marrow aspiration, lymph node biopsies/histologies, and various cancer specific clinical chemistry parameters (e.g. lactate dehydrogenase) and other established standard methods may be used.

[0417] Another major challenge in the development of drugs such as the pharmaceutical composition of the invention is the predictable modulation of pharmacokinetic properties. To this end, a pharmacokinetic profile of the drug candidate, i.e. a profile of the pharmacokinetic parameters that effect the ability of a particular drug to treat a given condition, is established. Pharmacokinetic parameters of the drug influencing the ability of a drug for treating a certain disease entity include, but are not limited to: half-life, volume of distribution, hepatic first-pass metabolism and the degree of blood serum binding. The efficacy of a given drug agent can be influenced by each of the parameters mentioned above.

[0418] “Half-life” means the time where 50% of an administered drug are eliminated through biological processes, e.g. metabolism, excretion, etc.

[0419] By “hepatic first-pass metabolism” is meant the propensity of a drug to be metabolized upon first contact with the liver, i.e. during its first pass through the liver. “Volume of distribution” means the degree of retention of a drug throughout the various compartments of the body, like e.g. intracellular and extracellular spaces, tissues and organs, etc. and the distribution of the drug within these compartments. “Degree of blood serum binding” means the propensity of a drug to interact with and bind to blood serum proteins, such as albumin, leading to a reduction or loss of biological activity of the drug.

[0420] Pharmacokinetic parameters also include bioavailability, lag time (Tlag), Tmax, absorption rates, more onset and/or Cmax for a given amount of drug administered. “Bioavailability” means the amount of a drug in the blood compartment.

[0421] “Lag time” means the time delay between the administration of the drug and its detection and measurability in blood or plasma.

[0422] “Tmax” is the time after which maximal blood concentration of the drug is reached, and “Cmax” is the blood concentration maximally obtained with a given drug. The time to reach a blood or tissue concentration of the drug which is required for its biological effect is influenced by all parameters. Pharmacokinetik parameters of bispecific single chain antibodies exhibiting cross-species specificity, which may be determined in preclinical animal testing in non-chimpanzee primates as outlined above are also set forth e.g. in the publication by Schlereth et al. (Cancer Immunol. Immunother. 20 (2005), 1-12).

[0423] The term “toxicity” as used herein refers to the toxic effects of a drug manifested in adverse events or severe adverse events. These side events might refer to a lack of tolerability of the drug in general and/or a lack of local tolerance after administration. Toxicity could also include teratogenic or carcinogenic effects caused by the drug.

[0424] The term “safety”, “in vivo safety” or “tolerability” as used herein defines the administration of a drug without inducing severe adverse events directly after administration (local tolerance) and during a longer period of application of the drug. “Safety”, “in vivo safety” or “tolerability” can be evaluated e.g. at regular intervals during the treatment and follow-up period. Measurements include clinical evaluation, e.g. organ manifestations, and screening of laboratory abnormalities. Clinical evaluation may be carried out and deviating to normal findings recorded/coded according to NCI-CTC and/or MedDRA standards. Organ manifestations may include criteria such as allergy/immunology, blood/bone marrow, cardiac arrhythmia, coagulation and the like, as set forth e.g. in the Common Terminology Criteria for adverse events v3.0 (CTCAE). Laboratory parameters which may be tested include for instance haematology, clinical chemistry, coagulation profile and urine analysis and examination of other body fluids such as serum, plasma, lymphoid or spinal fluid, liquor and the like. Safety can thus be assessed e.g. by physical examination, imaging techniques (i.e. ultrasound, x-ray, CT scans, Magnetic Resonance Imaging (MRI), other measures with technical devices (i.e. electrocardiogram), vital signs, by measuring laboratory parameters and recording adverse events. For example, adverse events in non-chimpanzee primates in the uses and methods according to the invention may be examined by histopathological and/or histochemical methods.

[0425] The term “effective and non-toxic dose” as used herein refers to a tolerable dose of the bispecific single chain antibody as defined herein which is high enough to cause depletion of pathologic cells, tumor elimination, tumor shrinkage or stabilization of disease without or essentially without major toxic effects. Such effective and non-toxic doses may be determined e.g. by dose escalation studies described in the art and should be below the dose inducing severe adverse side events (dose limiting toxicity, DLT).

[0426] The above terms are also referred to e.g. in the Preclinical safety evaluation of biotechnology-derived pharmaceuticals S6; ICH Harmonised Tripartite Guideline; ICH Steering Committee meeting on Jul. 16, 1997.

[0427] Moreover, the invention relates to a pharmaceutical composition comprising a bispecific single chain antibody molecule of this invention or produced according to the process according to the invention for the prevention, treatment or amelioration of cancer or autoimmune diseases.

[0428] Preferably, said cancer is for a PSCA×CD3 bispecific single chain antibody molecule prostate cancer, bladder cancer or pancreatic cancer.

[0429] Preferably, said cancer is for a CD19×CD3 bispecific single chain antibody molecule a B-cell malignancy such as non-Hodgkin Lymphoma, B-cell mediated autoimmune diseases or the depletion of B-cells.

[0430] Preferably, said cancer is for a c-MET×CD3 bispecific single chain antibody molecule is a carcinoma, sarcoma, glioblastoma/astrocytoma, melanoma, mesothelioma, Wilms tumor or a hematopoietic malignancy such as leukemia, lymphoma or multiple myeloma.

[0431] Preferably, said cancer is for an Endosialin×CD3 bispecific single chain antibody molecule a carcinoma (breast, kidney, lung, colorectal, colon, pancreas mesothelioma), a sarcoma, or a neuroectodermal tumor (melanoma, glioma, neuroblastoma).

[0432] Preferably, said cancer is for an EpCAM×CD3 bispecific single chain antibody molecule epithelial cancer or a minimal residual cancer.

[0433] Preferably, said cancer is for a FAPa×CD3 bispecific single chain antibody molecule epithelial cancer.

[0434] Preferably, said cancer is for a an IGF-1R×CD3 bispecific single chain antibody molecule bone or soft tissue cancer (e.g. Ewing sarcoma), breast, liver, lung, head and neck, colorectal, prostate, leiomyosarcoma, cervical and endometrial cancer, ovarian, prostate, and pancreatic cancer. Alternatively, the IGF-1R×CD3 bispecific single chain antibody molecule/polypeptide as defined herein above is also used in the prevention, treatment or amelioration of autoimmune diseases, preferably psoriasis.

[0435] Preferably, said pharmaceutical composition further comprises suitable formulations of carriers, stabilizers and/or excipients.

[0436] A further aspect of the invention relates to a use of a bispecific single chain antibody molecule/polypeptide as defined herein above or produced according to a process defined herein above, for the preparation of a pharmaceutical composition for the prevention, treatment or amelioration of a disease. Preferably, said disease is cancer or autoimmune diseases.

[0437] More preferably for a PSCA×CD3 bispecific single chain antibody molecule/polypeptide as defined herein above, said cancer is prostate cancer, bladder cancer or pancreatic cancer.

[0438] More preferably for a CD19×CD3 bispecific single chain antibody molecule/polypeptide as defined herein above, said cancer is a B-cell malignancy such as non-Hodgkin Lymphoma, B-cell mediated autoimmune diseases or the depletion of B-cells.

[0439] More preferably for a c-MET×CD3 bispecific single chain antibody molecule/polypeptide as defined herein above, said cancer is a carcinoma, sarcoma, glioblastoma/astrocytoma, melanoma, mesothelioma, Wilms tumor or a hematopoietic malignancy such as leukemia, lymphoma or multiple myeloma.

[0440] More preferably for an Endosialin×CD3 bispecific single chain antibody molecule/polypeptide as defined herein above, said cancer is a carcinoma (breast, kidney, lung, colorectal, colon, pancreas mesothelioma), a sarcoma, or a neuroectodermal tumor (melanoma, glioma, neuroblastoma).

[0441] More preferably for an EpCAM×CD3 bispecific single chain antibody molecule/polypeptide as defined herein above, said cancer is epithelial cancer or a minimal residual cancer.

[0442] More preferably for a FAPa×CD3 bispecific single chain antibody molecule/polypeptide as defined herein above, said cancer is epithelial cancer.

[0443] More preferably for an IGF-1R×CD3 bispecific single chain antibody molecule/polypeptide as defined herein above, said cancer is bone or soft tissue cancer (e.g. Ewing sarcoma), breast, liver, lung, head and neck, colorectal, prostate, leiomyosarcoma, cervical and endometrial cancer, ovarian, prostate, and pancreatic cancer. Alternatively, the IGF-1R×CD3 bispecific single chain antibody molecule/polypeptide as defined herein above is also used in the prevention, treatment or amelioration of autoimmune diseases, preferably psoriasis.

[0444] In another preferred embodiment of use of the bispecific single chain antibody molecule of the invention said pharmaceutical composition is suitable to be administered in combination with an additional drug, i.e. as part of a co-therapy. In said co-therapy, an active agent may be optionally included in the same pharmaceutical composition as the bispecific single chain antibody molecule of the invention, or may be included in a separate pharmaceutical composition. In this latter case, said separate pharmaceutical composition is suitable for administration prior to, simultaneously as or following administration of said pharmaceutical composition comprising the bispecific single chain antibody molecule of the invention. The additional drug or pharmaceutical composition may be a non-proteinaceous compound or a proteinaceous compound. In the case that the additional drug is a proteinaceous compound, it is advantageous that the proteinaceous compound be capable of providing an activation signal for immune effector cells.

[0445] Preferably, said proteinaceous compound or non-proteinaceous compound may be administered simultaneously or non-simultaneously with the bispecific single chain antibody molecule of the invention, a nucleic acid molecule as defined hereinabove, a vector as defined as defined hereinabove, or a host as defined as defined hereinabove.

[0446] Another aspect of the invention relates to a method for the prevention, treatment or amelioration of a disease in a subject in the need thereof, said method comprising the step of administration of an effective amount of a pharmaceutical composition of the invention. Preferably, said disease is cancer or autoimmune diseases.

[0447] More preferably for a PSCA×CD3 bispecific single chain antibody molecule/polypeptide as defined herein above-said cancer is prostate cancer, bladder cancer or pancreatic cancer.

[0448] More preferably for a CD19×CD3 bispecific single chain antibody molecule/polypeptide as defined herein above, said cancer is a B-cell malignancy such as non-Hodgkin Lymphoma, B-cell mediated autoimmune diseases or the depletion of B-cells.

[0449] More preferably for a c-MET×CD3 bispecific bispecific single chain antibody molecule/polypeptide as defined herein above, said cancer is a carcinoma, sarcoma, glioblastoma/astrocytoma, melanoma, mesothelioma, Wilms tumor or a hernatopoietic malignancy such as leukemia, lymphoma or multiple myeloma.

[0450] More preferably for an Endosialin×CD3 bispecific bispecific single chain antibody molecule/polypeptide as defined herein above, said cancer is a carcinoma (breast, kidney, lung, colorectal, colon, pancreas mesothelioma), a sarcoma, or a neuroectodermal tumor (melanoma, glioma, neuroblastoma).

[0451] More preferably for an EpCAM×CD3 bispecific single chain antibody molecule/polypeptide as defined herein above, said cancer is epithelial cancer or a minimal residual cancer.

[0452] More preferably for a FAPa×CD3 bispecific single chain antibody molecule/polypeptide as defined herein above, said cancer is epithelial cancer

[0453] More preferably for an IGF-1R×CD3 bispecific single chain antibody molecule/polypeptide as defined herein above, said cancer is bone or soft tissue cancer (e.g. Ewing sarcoma), breast, liver, lung, head and neck, colorectal, prostate, leiomyosarcoma, cervical and endometrial cancer, ovarian, prostate, and pancreatic cancer. Alternatively, the IGF-1R×CD3 bispecific single chain antibody molecule/polypeptide as defined herein above is also used in the prevention, treatment or amelioration of autoimmune diseases, preferably psoriasis.

[0454] In another preferred embodiment of the method of the invention said pharmaceutical composition is suitable to be administered in combination with an additional drug, i.e. as part of a co-therapy. In said co-therapy, an active agent may be optionally included in the same pharmaceutical composition as the bispecific single chain antibody molecule of the invention, or may be included in a separate pharmaceutical composition. In this latter case, said separate pharmaceutical composition is suitable for administration prior to, simultaneously as or following administration of said pharmaceutical composition comprising the bispecific single chain antibody molecule of the invention. The additional drug or pharmaceutical composition may be a non-proteinaceous compound or a proteinaceous compound. In the case that the additional drug is a proteinaceous compound, it is advantageous that the proteinaceous compound be capable of providing an activation signal for immune effector cells.

[0455] Preferably, said proteinaceous compound or non-proteinaceous compound may be administered simultaneously or non-simultaneously with the bispecific single chain antibody molecule of the invention, a nucleic acid molecule as defined hereinabove, a vector as defined as defined hereinabove, or a host as defined as defined hereinabove.

[0456] It is preferred for the above described method of the invention that said subject is a human.

[0457] In a further aspect, the invention relates to a kit comprising a bispecific single chain antibody molecule of the invention, a nucleic acid molecule of the invention, a vector of the invention, or a host of the invention.

[0458] These and other embodiments are disclosed and encompassed by the description and Examples of the present invention. Recombinant techniques and methods in immunology are described e.g. in Sambrook et al. Molecular Cloning: A Laboratory Manual; Cold Spring Harbor Laboratory Press, 3^{rd} edition 2001; Lefkovits; Immunology Methods Manual; The Comprehensive Sourcebook of Techniques; Academic Press, 1997; Golemis; Protein-Protein Interactions: A Molecular Cloning Manual; Cold Spring Laboratory Press, 2002. Further literature concerning any one of the antibodies, methods, uses and compounds to be employed in accordance with the present invention may be retrieved from public libraries and databases, using for example electronic devices. For example, the public database “Medline”, available on the Internet, may be utilized, for example under http://www.ncbi.nlm.nih.gov/PubMed/medline.html. Further databases and addresses such as http://www.ncbi.nlm.nih.gov/or listed at the EMBL-services homepage under http://www.embl.de/services/index.html are known to the person skilled in the art and can also be obtained using, e. g., http://www.google.com.

[0459] The figures show:

[0460] FIG. 1

[0461] Fusion of the N-terminal amino acids 1-27 of primate CD3 epsilon to a heterologous soluble protein.

[0462] FIG. 2

[0463] The figure shows the average absorption values of quadruplicate samples measured in an ELISA assay detecting the presence of a construct consisting of the N-terminal amino acids 1-27 of the mature human CD3 epsilon chain fused to the hinge and Fc gamma portion of human IgG1 and a C-terminal 6 Histidine tag in a supernatant of transiently transfected 293 cells. The first column labeled “27 aa huCD3E” shows the average absorption value for the construct, the second column labeled “irrel. SN” shows the average value for a supernatant of 293 cells transfected with an irrelevant construct as negative control. The comparison of the values obtained for the construct with the values obtained for the negative control clearly demonstrates the presence of the recombinant construct.

[0464] FIG. 3

[0465] The figure shows the average absorption values of quadruplicate samples measured in an ELISA assay detecting the binding of the cross species specific anti-CD3 binding molecules in form of crude preparations of periplasmatically expressed single-chain antibodies to a construct comprising the N-terminal 1-27 amino acids of the mature human CD3 epsilon chain fused to the hinge and Fc gamma portion of human IgG1 and a C-terminal His6 tag. The columns show from left to right the average absorption values for the specificities designated as A2J HLP, 120 HLP E2M HLP, F7O HLP, G4H HLP, H2C HLP, E1L HLP, F12Q HLP, F6A HLP and H1E HLP. The rightmost column labelled “neg. contr.” shows the average absorption value for the single-chain preparation of a murine anti-human CD3 antibody as negative control. The comparison of the values obtained for the anti-CD3 specificities with the values obtained for the negative control clearly demonstrates the strong binding of the anti-CD3 specificities to the N-terminal 1-27 amino acids of the mature human CD3 epsilon chain.

[0466] FIG. 4

[0467] Fusion of the N-terminal amino acids 1-27 of primate CD3 epsilon to a heterologous membrane bound protein.

[0468] FIG. 5

[0469] Histogram overlays of different transfectants tested in a FACS assay detecting the presence of recombinant transmembrane fusion proteins consisting of cynomolgus EpCAM and the N-terminal 1-27 amino acids of the human, marmoset, tamarin, squirrel monkey and domestic swine CD3 epsilon chain respectively. The histogram overlays from left to right and top to bottom show the results for the transfectants expressing the constructs comprising the human 27 mer, marmoset 27 mer, tamarin 27 mer, squirrel monkey 27 mer and swine 27 mer respectively. In the individual overlays the thin line represents a sample incubated with PBS with 2% FCS instead of anti-Flag M2 antibody as negative control and the bold line shows a sample incubated with the anti-Flag M2 antibody. For each construct the overlay of the histograms shows binding of the anti-Flag M2 antibody to the transfectants, which clearly demonstrates the expression of the recombinant constructs on the transfectants.

[0470] FIGS. 6A-6E

[0471] Histogram overlays of different transfectants tested in a FAGS assay detecting the binding of the cross-species specific anti-CD3 binding molecules in form of crude preparations of periplasmatically expressed single-chain antibodies to the N-terminal amino acids 1-27 of the human, marmoset, tamarin and squirrel monkey CD3 epsilon chain respectively fused to cynomolgus EpCAM.

[0472] FIG. 6A:

[0473] The histogram overlays from left to right and top to bottom show the results for the transfectants expressing the 1-27 CD3-EpCAM comprising the human 27 mer tested with the CD3 specific binding molecules designated H2C HLP, F12Q HLP, E2M HLP and G4H HLP respectively.

[0474] FIG. 6B:

[0475] The histogram overlays from left to right and top to bottom show the results for the transfectants expressing the 1-27 CD3-EpCAM comprising the marmoset 27 mer tested with the CD3 specific binding molecules designated H2C HLP, F12Q HLP, E2M HLP and G4H HLP respectively.

[0476] FIG. 6C:

[0477] The histogram overlays from left to right and top to bottom show the results for the transfectants expressing the 1-27 CD3-EpCAM comprising the tamarin 27 mer tested with the CD3 specific binding molecules designated H2C HLP, F12Q HLP, E2M HLP and G4H HLP respectively.

[0478] FIG. 6D:

[0479] The histogram overlays from left to right and top to bottom show the results for the transfectants expressing the 1-27 CD3-EpCAM comprising the squirrel monkey 27 mer tested with the CD3 specific binding molecules designated H2C HLP, F12Q HLP, E2M HLP and G4H HLP respectively.

[0480] FIG. 6E:

[0481] The histogram overlays from left to right and top to bottom show the results for the transfectants expressing the 1-27 CD3-EpCAM comprising the swine 27 mer tested with the CD3 specific binding molecules designated H2C HLP, F12Q HLP, E2M HLP and G4H HLP respectively.

[0482] In the individual overlays the thin line represents a sample incubated with a single-chain preparation of a murine anti-human CD3-antibody as negative control and the bold line shows a sample incubated with the respective anti-CD3 binding molecules indicated. Considering the lack of binding to the swine 27 mer transfectants and the expression levels of the constructs shown in FIG. 5 the overlays of the histograms show specific and strong binding of the tested anti-CD3 specificities of the fully cross-species specific human bispecific single chain antibodies to cells expressing the recombinant transmembrane fusion proteins comprising the N-terminal amino acids 1-27 of the human, marmoset, tamarin and squirrel monkey CD3 epsilon chain respectively fused to cynomolgus EpCAM and show therefore multi primate cross-species specificity of the anti-CD3 binding molecules.

[0483] FIG. 7

[0484] FACS assay for detection of human CD3 epsilon on transfected murine EL4 T cells. Graphical analysis shows an overlay of histograms. The bold line shows transfected cells incubated with the anti-human CD3 antibody UCHT-1. The thin line represents cells incubated with a mouse IgG1 isotype control. Binding of the anti CD3 antibody UCHT1 clearly shows expression of the human CD3 epsilon chain on the cell surface of transfected murine EL4 T cells.

[0485] FIGS. 8A-8D

[0486] Binding of cross-species specific anti CD3 antibodies to alanine-mutants in an alanine scanning experiment. In the individual Figures the columns show from left to right the calculated binding values in arbitrary units in logarithmic scale for the wild-type transfectant (WT) and for all alanine-mutants from the position 1 to 27. The binding values are calculated using the following formula:

$$value\_Sample ( x , y ) = \frac{Sample ( x , y ) - neg\_Contr . ( x )}{\begin{matrix}( UCHT - 1 ( x ) - neg\_Contr . ( x ) ) * \\ \frac{WT ( y ) - neg\_Contr . ( wt )}{UCHT - 1 ( wt ) - neg\_Contr . ( wt )}\end{matrix}}$$

[0487] In this equation

value_Sample means the value in arbitrary units of binding depicting the degree of binding of a specific anti-CD3 antibody to a specific alanine-mutant as shown in the Figure, Sample means the geometric mean fluorescence value obtained for a specific anti-CD3 antibody assayed on a specific alanine-scanning transfectant, neg Contr. means the geometric mean fluorescence value obtained for the negative control assayed on a specific alanine-mutant, UCHT-1 means the geometric mean fluorescence value obtained for the UCHT-1 antibody assayed on a specific alanine-mutant, WT means the geometric mean fluorescence value obtained for a specific anti-CD3 antibody assayed on the wild-type transfectant, x specifies the respective transfectant, y specifies the respective anti-CD3 antibody and wt specifies that the respective transfectant is the wild-type. Individual alanine-mutant positions are labelled with the single letter code of the wild-type amino acid and the number of the position.

[0488] FIG. 8A:

[0489] The figure shows the results for cross-species specific anti CD3 antibody A2J HLP expressed as chimeric IgG molecule. Reduced binding activity is observed for mutations to alanine at position 4 (asparagine), at position 23 (threonine) and at position 25 (isoleucine). Complete loss of binding is observed for mutations to alanine at position 1 (glutamine), at position 2 (aspartate), at position 3 (glycine) and at position 5 (glutamate).

[0490] FIG. 8B:

[0491] The figure shows the results for cross-species specific anti CD3 antibody E2M HLP, expressed as chimeric IgG molecule. Reduced binding activity is observed for mutations to alanine at position 4 (asparagine), at position 23 (threonine) and at position 25 (isoleucine). Complete loss of binding is observed for mutations to alanine at position 1 (glutamine), at position 2 (aspartate), at position 3 (glycine) and at position 5 (glutamate).

[0492] FIG. 8C:

[0493] The figure shows the results for cross-species specific anti CD3 antibody H2C HLP, expressed as chimeric IgG molecule. Reduced binding activity is observed for mutations to alanine at position 4 (asparagine). Complete loss of binding is observed for mutations to alanine glutamine at position 1 (glutamine), at position 2 (aspartate), at position 3 (glycine) and at position 5 (glutamate).

[0494] FIG. 8D:

[0495] shows the results for cross-species specific anti CD3 antibody F12Q HLP, tested as periplasmatically expressed single-chain antibody. Complete loss of binding is observed for mutations to alanine at position 1 (glutamine), at position 2 (aspartate), at position 3 (glycine) and at position 5 (glutamate).

[0496] FIG. 9

[0497] FACS assay detecting the binding of the cross-species specific anti-CD3 binding molecule H2C HLP to human CD3 with and without N-terminal His6 tag.

[0498] Histogram overlays are performed of the EL4 cell line transfected with wild-type human CD3 epsilon chain (left histogram) or the human CD3 epsilon chain with N-terminal His6 tag (right histogram) tested in a FACS assay detecting the binding of cross-species specific binding molecule H2C HLP. Samples are incubated with an appropriate isotype control as negative control (thin line), anti-human CD3 antibody UCHT-1 as positive control (dotted line) and cross-species specific anti-CD3 antibody H2C HLP in form of a chimeric IgG molecule (bold line).

[0499] Histogram overlays show comparable binding of the UCHT-1 antibody to both transfectants as compared to the isotype control demonstrating expression of both recombinant constructs. Histogram overlays also show binding of the anti-CD3 binding molecule H2C HLP only to the wild-type human CD3 epsilon chain but not to the His6-human CD3 epsilon chain. These results demonstrate that a free N-terminus is essential for binding of the cross-species specific anti-CD3 binding molecule H2C HLP

[0500] FIG. 10

[0501] FACS binding analysis of designated cross-species specific bispecific single chain constructs to CHO cells transfected with the human MCSP D3, human CD3+ T cell line HPB-ALL, CHO cells transfected with cynomolgus MCSP D3 and a macaque T cell line 4119 LnPx. The FACS staining is performed as described in Example 10. The thick line represents cells incubated with 2 μg/ml purified protein that are subsequently incubated with the anti-his antibody and the PE labeled detection antibody. The thin histogram line reflects the negative control: cells only incubated with the anti-his antibody and the detection antibody.

[0502] FIG. 11

[0503] FAGS binding analysis of designated cross-species specific bispecific single chain constructs CHO cells transfected with the human MCSP D3, human CD3+ T cell line HPB-ALL, CHO cells transfected with cynomolgus MCSP D3 and a macaque T cell line 4119 LnPx. The FACS staining is performed as described in Example 10. The thick line represents cells incubated with 2 μg/ml purified protein that are subsequently incubated with the anti-his antibody and the PE labeled detection antibody. The thin histogram line reflects the negative control: cells only incubated with the anti-his antibody and the detection antibody.

[0504] FIG. 12

[0505] FACS binding analysis of designated cross-species specific bispecific single chain constructs CHO cells transfected with the human MCSP D3, human CD3+ T cell line HPB-ALL, CHO cells transfected with cynomolgus MCSP D3 and a macaque T cell line 4119 LnPx. The FACS staining is performed as described in Example 10. The thick line represents cells incubated with 2 μg/ml purified monomeric protein that are subsequently incubated with the anti-his antibody and the PE labeled detection antibody. The thin histogram line reflects the negative control: cells only incubated with the anti-his antibody and the detection antibody.

[0506] FIG. 13

[0507] Cytotoxicity activity induced by designated cross-species specific MCSP specific single chain constructs redirected to indicated target cell lines. A) Stimulated CD4−/CD56− human PBMCs are used as effector cells, CHO cells transfected with human MCSP D3 as target cells. B) The macaque T cell line 4119 LnPx are used as effector cells, CHO cells transfected with cynomolgus MCSP D3 as target cells. The assay is performed as described in Example 11.

[0508] FIG. 14

[0509] Cytotoxicity activity induced by designated cross-species specific MCSP specific single chain constructs redirected to indicated target cell lines. A) and B) The macaque T cell line 4119 LnPx are used as effector cells, CHO cells transfected with cynomolgus MCSP D3 as target cells. The assay is performed as described in Example 11.

[0510] FIG. 15

[0511] Cytotoxicity activity induced by designated cross-species specific MCSP specific single chain constructs redirected to indicated target cell lines. A) and B) Stimulated CD4−/CD56− human PBMCs are used as effector cells, CHO cells transfected with human MCSP D3 as target cells. The assay is performed as described in Example 11.

[0512] FIG. 16

[0513] Cytotoxicity activity induced by designated cross-species specific MCSP specific single chain constructs redirected to indicated target cell lines. A) Stimulated CD4−/CD56− human PBMCs are used as effector cells, CHO cells transfected with human MCSP D3 as target cells. B) The macaque T cell line 4119 LnPx are used as effector cells, CHO cells transfected with cynomolgus MCSP D3 as target cells. The assay is performed as described in Example 11.

[0514] FIG. 17

[0515] Cytotoxicity activity induced by designated cross-species specific MCSP specific single chain constructs redirected to indicated target cell lines. A) Stimulated CD4−/CD56− human PBMCs are used as effector cells, CHO cells transfected with human MCSP D3 as target cells. B) The macaque T cell line 4119 LnPx are used as effector cells, CHO cells transfected with cynomolgus MCSP D3 as target cells. The assay is performed as described in Example 11.

[0516] FIG. 18

[0517] Plasma stability of MCSP and CD3 cross-species specific bispecific single chain antibodies tested by the measurement of cytotoxicity activity induced by samples of the designated single chain constructs incubated with 50% human plasma at 37° C. and 4° C. for 24 hours respectively or with addition of 50% human plasma immediately prior to cytotoxicity testing or without addition of plasma. CHO cells transfected with human MCSP are used as target cell line and stimulated CD4−/CD56− human PBMCs are used as effector cells. The assay is performed as described in Example 12.

[0518] FIG. 19

[0519] Initial drop and recovery (i.e. redistribution) of absolute T cell counts (open squares), in peripheral blood of B-NHL patients (patent numbers 1, 7, 23, 30, 31, and 33 of Table 4), who had essentially no circulating CD19-positive target B cells (filled triangles), during the starting phase of intravenous infusion with the CD3 binding molecule CD19×CD3 recognizing a conventional context dependent CD3 epitope. Absolute cell counts are given in 1000 cells per microliter blood. The first data point shows baseline counts immediately prior to the start of infusion. The CD19×CD3 dose is given in parentheses beside the patient number.

[0520] FIG. 20

[0521] (A) Repeated T cell redistribution (open squares) in B-NHL patient #19 (Table 4) who had no circulating CD19-positive target B cells (filled triangles) and developed CNS symptoms under continuous intravenous infusion with CD19×CD3 at a starting dose of 5 μg/m²/24 h for one day followed by a sudden dose increase to 15 μg/m²/24 h. Absolute cell counts are given in 1000 cells per microliter blood. The first data point shows baseline counts immediately prior to the start of infusion. After recovery of circulating T cells from the first episode of redistribution triggered by the treatment start at 5 μg/m²/24 h the stepwise dose increase from 5 to 15 μg/m²/24 h triggered a second episode of T cell redistribution that was associated with the development of CNS symptoms dominated by confusion and disorientation.

[0522] (B) Repeated T cell redistribution in a B-NHL patient, who developed CNS symptoms under repeated intravenous bolus infusion with CD19×CD3 at 1.5 μg/m². Absolute cell counts are given in 1000 cells per microliter blood. The infusion time for each bolus administration was 2 to 4 hours. Vertical arrows indicate the start of bolus infusions. Data points at the beginning of each bolus administration show the T cell counts immediately prior to start of bolus infusion. Each bolus infusion triggered an episode of T cell redistribution followed by recovery of the T cell counts prior to the next bolus infusion. Finally the third episode of T cell redistribution was associated with the development of CNS symptoms in this patient.

[0523] FIG. 21

[0524] Complex T cell redistribution pattern (open squares) in B-NHL patient #20 (Table 4) without circulating CD19-positive target B cells (filled triangles), during ramp initiation of the CD19×CD3 infusion i.e. even gradual increase of flow-rate from almost zero to 15 μg/m²/24 h during the first 24 hours of treatment. Absolute cell counts are given in 1000 cells per microliter blood. The first data point shows baseline counts immediately prior to the start of infusion. The CD19×CD3 dose is given in parentheses beside the patient number. T cells reappearing in the circulating blood after the initial redistribution triggered by the first exposure to CD19×CD3 are partially induced to redisappear from circulating blood again by still increasing levels of CD19×CD3 during the ramp phase.

[0525] FIG. 22

[0526] T and B cell counts during treatment with CD19×CD3 of B-NHL patient #13 (Table 4) who had a significant number of circulating CD19-positive target B (lymphoma) cells (filled triangles). Absolute cell counts are given in 1000 cells per microliter blood. The first data point shows baseline counts immediately prior to the start of infusion. The CD19×CD3 dose is given in parentheses beside the patient number. T cells (open squares) disappear completely from the circulation upon start of CD19×CD3 infusion and do not reappear until the circulating CD19-positive B (lymphoma) cells (filled triangles) are depleted from the peripheral blood.

[0527] FIG. 23

[0528] Repeated T cell redistribution (open squares) in B-NHL patient #24 (Table 4), who had essentially no circulating CD19-positive target B cells (filled triangles) and developed CNS symptoms upon initiation of CD19×CD3 infusion without additional HSA as required for stabilisation of the drug (upper panel). After first recovery of circulating T cells from initial redistribution the uneven drug flow due to the lack of stabilizing HSA triggered a second episode of T cell redistribution that was associated with the development of CNS symptoms dominated by confusion and disorientation. When the same patient was restarted correctly with CD19×CD3 solution containing additional HSA for drug stabilisation, no repeated T cell redistribution was observed (lower panel) and the patient did not again develop any CNS symptoms. Absolute cell counts are given in 1000 cells per microliter blood. The first data point shows baseline counts immediately prior to the start of infusion. The CD19×CD3 dose is given in parentheses beside the patient number.

[0529] FIG. 24

[0530] Model of T cell adhesion to endothelial cells induced by monovalent binding to context dependent CD3 epitopes. Monovalent interaction of a conventional CD3 binding molecule to its context dependent epitope on CD3 epsilon can lead to an allosteric change in the conformation of CD3 followed by the recruitment of Nck2 to the cytoplasmic domain of CD3 epsilon (Gil et al. (2002) Cell 109: 901). As Nck2 is directly linked to integrins via PINCH and ILK (Legate et al. (2006) Nat Rev Mol Cell Biol 7: 20), recruitment of Nck2 to the cytoplasmic domain of CD3 epsilon following an allosteric change in the conformation of CD3 through binding of a conventional CD3 binding molecule (like the CD19×CD3 of example 13) to its context dependent epitope on CD3 epsilon, can increase the adhesiveness of T cells to endothelial cells by transiently switching integrins on the T cell surface into their more adhesive isoform via inside-out-signalling.

[0531] FIG. 25

[0532] Cytotoxic activity of CD33-AF5 VH-VL×I2C VH-VL test material used for the in vivo study in cynomolgus monkeys as described in Example 14. Specific lysis of CD33-positive target cells was determined in a standard ⁵¹Chromium release assay at increasing concentrations of CD33-AF5 VH-VL×I2C VH-VL. Assay duration was 18 hours. The macaque T cell line 4119 LnPx was used as source of effector cells. CHO cells transfected with cynomolgus CD33 served as target cells. Effector- to target cell ratio (E:T-ratio) was 10:1. The concentration of CD33-AF5 VH-VL×I2C VH-VL required for half-maximal target cell lysis (EC50) was calculated from the dose response curve with a value of 2.7 ng/ml.

[0533] FIG. 26

[0534] (A) Dose- and time-dependent depletion of CD33-positive monocytes from the peripheral blood of cynomolgus monkeys through intravenous continuous infusion of CD33-AF5 VH-VL×I2C VH-VL as described in Example 14. The percentage relative to baseline (i.e. 100%) of absolute circulating CD33-positive monocyte counts after the duration of treatment as indicated above the columns is shown for each of two cynomolgus monkeys per dose level. The dose level (i.e. infusion flow-rate) is indicated below the columns. No depletion of circulating CD33-positive monocytes was observed in animals 1 and 2 treated for 7 days at a dose of 30 μg/m²/24 h. In animals 3 and 4 treated for 7 days at a dose of 60 μg/m²/24 h circulating CD33-positive monocyte counts were reduced to 68% and 40% of baseline, respectively. At 240 μg/m²/24 h circulating CD33-positive monocytes were almost completely depleted from the peripheral blood after 3 days of treatment (animals 5 and 6). At 1000 μg/m²/24 h depletion of circulating CD33-positive monocytes from the peripheral blood was completed already after 1 day of treatment (animals 7 and 8).

[0535] (B) Course of T cell and CD33-monocyte counts in peripheral blood of two cynomolgus monkeys during continuous infusion of CD33-AF5 VH-VL×I2C VH-VL for 14 days at 120 μg/m²/24 h. Absolute cell counts are given in 1000 cells per microliter blood. The first data point shows baseline counts immediately prior to the start of infusion. After initial mobilisation of CD33-monocytes during the first 12 hours upon start of infusion CD33-monocytes in peripheral blood (filled triangles) are depleted by two thirds (animal 10) and 50% (animal 9) relative to the respective baseline counts during the further course of infusion. Circulating T cell counts (open squares) show a limited initial drop followed by recovery still during the presence of circulating CD33-positive monocytic target cells.

[0536] FIG. 27

[0537] Cytotoxic activity of MCSP-G4 VH-VL×I2C VH-VL test material used for the in vivo study in cynomolgus monkeys as described in Example 15. Specific lysis of MCSP-positive target cells was determined in a standard ⁵¹Chromium release assay at increasing concentrations of MCSP-G4 VH-VL×I2C VH-VL. Assay duration was 18 hours. The macaque T cell line 4119 LnPx was used as source of effector cells. CHO cells transfected with cynomolgus MCSP served as target cells. Effector- to target cell ratio (E:T-ratio) was 10:1. The concentration of MCSP-G4 VH-VL×I2C VH-VL required for half-maximal target cell lysis (EC50) was calculated from the dose response curve with a value of 1.9 ng/ml.

[0538] FIG. 28

[0539] Absence of initial episodes of drop and subsequent recovery of absolute T cell counts (i.e. redistribution) in peripheral blood of cynomolgus monkeys during the starting phase of intravenous infusion with the CD3 binding molecule MCSP-G4 VH-VL×I2C VH-VL recognizing an essentially context independent CD3 epitope. Absolute cell counts are given in 1000 cells per microliter blood. The first data point shows baseline counts immediately prior to the start of infusion. The MCSP-G4 VH-VL×I2C VH-VL dose is given in parentheses beside the animal number. In the known absence of MCSP-positive target cells from the circulating blood of cynomolgus monkeys there is no induction of T cell redistribution (i.e. an initial episode of drop and subsequent recovery of absolute T cell counts) through target cell mediated crosslinking of CD3. Moreover, induction of T cell redistribution (i.e. an initial episode of drop and subsequent recovery of absolute T cell counts) through a signal, which the T cells may receive through exclusive interaction with a CD3 binding site only, can be avoided by the use of CD3 binding molecules like MCSP-G4 VH-VL×I2C VH-VL recognizing an essentially context independent CD3 epitope.

[0540] FIG. 29

[0541] FACS binding analysis of designated cross-species specific bispecific constructs to CHO cells transfected with human CD33, the human CD3+ T cell line HPB-ALL, CHO cells transfected with macaque CD33 and macaque PBMC respectively. The FACS staining is performed as described in Example 16.4. The bold lines represent cells incubated with 5 μg/ml purified bispecific single chain construct or cell culture supernatant of transfected cells expressing the cross-species specific bispecific antibody constructs. The filled histograms reflect the negative controls. Supernatant of untransfected CHO cells was used as negative control. For each cross-species specific bispecific single chain construct the overlay of the histograms shows specific binding of the construct to human and macaque CD33 and human and macaque CD3.

[0542] FIG. 30

[0543] The diagrams show results of chromium release assays measuring cytotoxic activity induced by designated cross-species specific CD33 specific single chain constructs redirected to the indicated target cell lines. Effector cells were also used as indicated. The assays are performed as described in Example 16.5. The diagrams clearly demonstrate for each construct the potent recruitment of cytotoxic activity of human and macaque effector cells against human and macaque CD33 transfected CHO cells, respectively.

[0544] FIG. 31

[0545] SDS PAGE gel and Western blot monitoring the purification of the cross-species specific bispecific single chain molecule designated E292F3 HL×I2C HL. Samples from the eluate, the cell culture supernatant (SN) and the flow through of the column (FT) were analyzed as indicated. A protein marker (M) was applied as size reference. A strong protein band with a molecular weight between 50 and 60 kDa in the SDS PAGE gel demonstrates the efficient purification of the cross-species specific bispecific single chain molecule to a very high degree of purity with the one-step purification method described in Example 17.2. The Western blot detecting the histidine₆ tag confirms the identity of the protein band in the eluate as the cross-species specific bispecific single chain molecule. The faint signal for the flow through sample in this sensitive detection method further shows the nearly complete capture of bispecific single chain molecules by the purification method.

[0546] FIG. 32

[0547] SDS PAGE gel and Western blot monitoring the purification of the cross-species specific bispecific single chain molecule designated V207C12 HL×H2C HL. Samples from the eluate, the cell culture supernatant (SN) and the flow through of the column (FT) were analyzed as indicated. A protein marker (M) was applied as size reference. A strong protein band with a molecular weight between 50 and 60 kDa in the SDS PAGE gel demonstrates the efficient purification of the cross-species specific bispecific single chain molecule to a very high degree of purity with the one-step purification method described in Example 17.2. The Western blot detecting the histidine₆ tag confirms the identity of the protein band in the eluate as the cross-species specific bispecific single chain molecule. The faint signal for the flow through sample in this sensitive detection method further shows the nearly complete capture of bispecific single chain molecules by the purification method.

[0548] FIG. 33

[0549] SDS PAGE gel and Western blot monitoring the purification of the cross-species specific bispecific single chain molecule designated AF5HL×F12QHL. Samples from the eluate, the cell culture supernatant (SN) and the flow through of the column (FT) were analyzed as indicated. A protein marker (M) was applied as size reference. A strong protein band with a molecular weight between 50 and 60 kDa in the SDS PAGE gel demonstrates the efficient purification of the cross-species specific bispecific single chain molecule to a very high degree of purity with the one-step purification method described in Example 17.2. The Western blot detecting the histidine₆ tag confirms the identity of the protein band in the eluate as the cross-species specific bispecific single chain molecule. The signal in the flow through sample in this sensitive detection method is explained by saturation of the affinity column due to the high concentration of bispecific single chain molecules in the supernatant.

[0550] FIG. 34

[0551] Standard curve of AF5HL×I2CHL in 50% macaque monkey serum. The upper diagram shows the standard curve generated for the assay as described in Example 18.2

[0552] The lower diagram shows results for quality control samples of AF5HL×I2CHL in 50% macaque monkey serum. The recovery rates are above 90% for the high and mid QC sample and above 80% for the low QC sample.

[0553] Thus the assay allows for detection of AF5HL×I2CHL in serum samples in the range from 10 ng/ml to 200 ng/ml (before dilution).

[0554] FIG. 35

[0555] Standard curve of MCSP-G4 HL×I2C HL in 50% macaque monkey serum. The upper diagram shows the standard curve generated for the assay as described in Example 18.2.

[0556] The lower diagram shows results for quality control samples of MCSP-G4 HL×I2C HL in 50% macaque monkey serum. The recovery rates are above 98% for the high and mid QC sample and above 85% for the low QC sample.

[0557] Thus the assay allows for detection of MCSP-G4 HL×I2C HL in serum samples in the range from 10 ng/ml to 200 ng/ml (before dilution).

[0558] FIG. 36

[0559] FAGS binding analysis of an anti-Flag antibody to CHO cells transfected with the 1-27 N-terminal amino acids of CD3 epsilon of the designated species fused to cynomolgus EpCAM. The FACS staining was performed as described in Example 19.1. The bold lines represent cells incubated with the anti-Flag antibody. The filled histograms reflect the negative controls. PBS with 2% FCS was used as negative control. The histograms show strong and comparable binding of the anti-Flag antibody to all transfectants indicating strong and equal expression of the transfected constructs.

[0560] FIG. 37

[0561] FACS binding analysis of the I2C IgG1 construct to CHO cells expressing the 1-27 N-terminal amino acids of CD3 epsilon of the designated species fused to cynomolgus EpCAM. The FACS staining is performed as described in Example 19.3. The bold lines represent cells incubated with 50 μl cell culture supernatant of cells expressing the I2C IgG1 construct. The filled histograms reflect the negative control. Cells expressing the 1-27 N-terminal amino acids of CD3 epsilon of swine fused to cynomolgus EpCAM were used as negative control. In comparison with the negative control the histograms clearly demonstrate binding of the I2C IgG1 construct to 1-27 N-terminal amino acids of CD3 epsilon of human, marmoset, tamarin and squirrel monkey.

[0562] FIG. 38

[0563] FACS binding analysis of the I2C IgG1 construct as described in Example 19.2 to human CD3 with and without N-terminal His6 tag as described in Examples 6.1 and 5.1 respectively. The bold lines represent cells incubated with the anti-human CD3 antibody UCHT-1, the penta-His antibody (Qiagen) and cell culture supernatant of cells expressing the I2C IgG1 construct respectively as indicated. The filled histograms reflect cells incubated with an irrelevant murine IgG1 antibody as negative control.

[0564] The upper two histogram overlays show comparable binding of the UCHT-1 antibody to both transfectants as compared to the isotype control demonstrating expression of both recombinant constructs. The centre histogram overlays show binding of the penta his antibody to the cells expressing the His6-human CD3 epsilon chain (His6-CD3) but not to the cells expressing the wild-type CD3 epsilon chain (WT-CD3). The lower Histogram overlays show binding of the I2C IgG1 construct to the wild-type human CD3 epsilon chain but not to the His6-human CD3 epsilon chain. These results demonstrate that a free N-terminus is essential for binding of the cross-species specific anti-CD3 binding molecule I2C to the CD3 epsilon chain.

[0565] FIG. 39

[0566] FACS binding analysis of designated cross-species specific bispecific single chain constructs to CHO cells transfected with human MCSP D3, the human CD3+ T cell line HPB-ALL, CHO cells transfected with macaque MCSP D3 and the macaque T cell line 4119 LnPx respectively. The FACS staining was performed as described in Example 10. The bold lines represents cells incubated with 2 μg/ml purified bispecific single chain construct or cell supernatant containing the bispecific single chain construct respectively. The filled histograms reflect the negative controls. Supernatant of untransfected CHO cells was used as negative control for binding to the T cell lines. A single chain construct with irrelevant target specificity was used as negative control for binding to the MCSP D3 transfected CHO cells. For each cross-species specific bispecific single chain construct the overlay of the histograms shows specific binding of the construct to human and macaque MCSP D3 and human and macaque CD3.

[0567] FIG. 40

[0568] Cytotoxic activity induced by designated cross-species specific MCSP D3 specific single chain constructs redirected to the indicated target cell lines. Effector cells and effector to target ratio were also used as indicated. The assay is performed as described in Example 11. The diagrams clearly demonstrate potent cross-species specific recruitment of cytotoxic activity by each construct.

[0569] FIG. 41

[0570] FACS binding analysis of designated cross-species specific bispecific single chain constructs to CHO cells transfected with human CD33, the human CD3+ T cell line HPB-ALL, CHO cells transfected with macaque CD33 and macaque PBMC respectively. The FAGS staining was performed as described in Example 21.2. The bold lines represent cells incubated with cell culture supernatant of transfected cells expressing the cross-species specific bispecific antibody constructs. The filled histograms reflect the negative controls. Supernatant of untransfected CHO cells was used as negative control. For each cross-species specific bispecific single chain construct the overlay of the histograms shows specific binding of the construct to human and macaque CD33 and human and macaque CD3.

[0571] FIG. 42

[0572] The diagrams show results of chromium release assays measuring cytotoxic activity induced by designated cross-species specific CD33 specific single chain constructs redirected to the indicated target cell lines. Effector cells were also used as indicated. The assays are performed as described in Example 21.3. The diagrams clearly demonstrate for each construct the potent recruitment of cytotoxic activity of human and macaque effector cells against human and macaque CD33 transfected CHO cells, respectively.

[0573] FIG. 43

[0574] T cell redistribution in a chimpanzee under weekly intravenous bolus infusion with PBS/5% HSA and PBS/5% HSA plus single-chain EpCAM/CD3-bispecific antibody construct at doses of 1.6, 2.0, 3.0 and 4.5 μg/kg. The infusion time for each bolus administration was 2 hours. Vertical arrows indicate the start of bolus infusions. Data points at the beginning of each bolus administration show the T cell counts immediately prior to start of bolus infusion. Each bolus infusion of the single-chain EpCAM/CD3-bispecific antibody construct, which recognizes a conventional context dependent CD3 epitope, triggered an episode of T cell redistribution followed by recovery of T cells to baseline values prior to the next bolus infusion.

[0575] FIG. 44

[0576] CD3 specific ELISA analysis of periplasmic preparations containing Flag tagged scFv protein fragments from selected clones. Periplasmic preparations of soluble scFv protein fragments were added to wells of an ELISA plate, which had been coated with soluble human CD3 epsilon (aa 1-27)-Fc fusion protein and had been additionally blocked with PBS 3% BSA. Detection was performed by a monoclonal anti Flag-Biotin-labeled antibody followed by peroxidase-conjugated Streptavidin. The ELISA was developed by an ABTS substrate solution. The OD values (y axis) were measured at 405 nm by an ELISA reader. Clone names are presented on the x axis.

[0577] FIG. 45

[0578] ELISA analysis of periplasmic preparations containing Flag tagged scFv protein fragments from selected clones. The same periplasmic preparations of soluble scFv protein fragments as in FIG. 44 were added to wells of an ELISA plate which had not been coated with human CD3 epsilon (aa 1-27)-Fc fusion protein but with hulgG1 (Sigma) and blocked with 3% BSA in PBS.

[0579] Detection was performed by a monoclonal anti Flag-Biotin-labeled antibody followed by peroxidase-conjugated Streptavidin. The ELISA was developed by an ABTS substrate solution. The OD values (y axis) were measured at 405 nm by an ELISA reader. Clone names are presented on the x axis.

[0580] FIG. 46

[0581] FIGS. 46A-G: FACS binding analysis of designated cross-species specific bispecific single chain constructs to CHO cells transfected with human PSCA, the human CD3+ T cell line HPB-ALL, CHO cells transfected with macaque PSCA and to the macaque T cell line 4119LnPx, respectively. The FACS staining was performed as described in Example 24.5. The bold lines represent cells incubated with cell culture supernatant of transfected cells expressing the cross-species specific bispecific antibody constructs. The filled histograms reflect the negative controls. Supernatant of untransfected cells was used as a negative control. For each cross-species specific bispecific single chain construct the overlay of the histograms shows specific binding of the construct to human and macaque PSCA and human and macaque CD3.

[0582] FIG. 47

[0583] FIG. 47A-C: The diagrams show results of chromium release assays measuring cytotoxic activity induced by the designated cross-species specific bispecific single chain constructs redirected to the indicated target cell lines. Effector cells were also used as indicated. The assays were performed as described in Example 24.6. The diagrams clearly demonstrate for each construct the potent recruitment of cytotoxic activity of human and macaque effector cells against cells positive for human and macaque PSCA, respectively.

[0584] FIG. 48

[0585] FACS binding analysis of designated cross-species specific bispecific single chain constructs to CHO cells transfected with human PSCA, the human CD3+ T cell line HPB-ALL, CHO cells transfected with macaque PSCA and to the macaque T cell line 4119LnPx, respectively. The FACS staining was performed as described in Example 45.5. The bold lines represent cells incubated with cell culture supernatant of transfected cells expressing the cross-species specific bispecific antibody constructs. The filled histograms show the negative controls. Supernatant of untransfected cells was used as negative control. For each cross-species specific bispecific single chain construct the overlay of the histograms shows specific binding of the construct to human and macaque PSCA and human and macaque CD3.

[0586] FIG. 49

[0587] The diagrams show results of chromium release assays measuring cytotoxic activity induced by designated cross-species specific bispecific single chain constructs redirected to the indicated target cell lines. Effector cells were also used as indicated. The assays were performed as described in Example 24.6. The diagrams clearly demonstrate for each construct the potent recruitment of cytotoxic activity of human and macaque effector T cells against target cells positive for human and macaque PSCA, respectively.

[0588] FIG. 50

[0589] FACS binding analysis of designated cross-species specific bispecific single chain constructs to CHO cells transfected with human CD19, the human CD3-positive T cell line HPB-ALL, and the CD3-positive macaque T cell line 4119 LnPx. The FACS staining is performed as described in Example 25.4. The thick-line histograms represent cells incubated with cell culture supernatant and subsequently with a murine anti-His-tag antibody followed by a PE-labeled anti-murine Ig detection antibody. The thin-lined histograms represent the negative control i.e. cells only incubated with the anti-His-tag antibody and the anti-murine Ig detection antibody.

[0590] FIG. 51

[0591] Cytotoxic T cell activity redirected by designated cross-species specific bispecific single chain constructs against the indicated target cell line. A) Stimulated CD4/CD56-depleted human PBMCs are used as effector T cells and CHO cells transfected with human CD19 as target cells. B) The macaque T cell line 4119 LnPx is used as source of effector cells and CHO cells transfected with human CD19 are used as target cells. The assay is performed as described in Example 25.5.

[0592] FIG. 52

[0593] FACS binding analysis of the designated cross-species specific bispecific single chain constructs to the C-MET positive human breast cancer cell line MDA-MB-231, the human CD3+ T cell line HPB-ALL and to the macaque CD3+ T cell line 4119LnPx respectively. The FACS staining was performed as described in Example 26.5. The bold lines represent cells incubated with cell culture supernatant of transfected cells expressing the cross-species specific bispecific antibody constructs. The filled histograms represent the negative controls. Supernatant of untransfected cells was used as a negative control. For each cross-species specific bispecific single chain construct the overlay of the histograms shows specific binding of the construct to C-MET and human and macaque CD3.

[0594] FIG. 53

[0595] The diagrams show results of chromium release assays measuring cytotoxic activity induced by the designated cross-species specific bispecific single chain constructs redirected to the indicated target cell lines. Effector cells were also used as indicated. The assays were performed as described in Example 26.6. The diagrams clearly demonstrate for each construct the potent recruitment of cytotoxic activity of human effector cells against cells positive for C-MET.

[0596] FIG. 54

[0597] FACS binding analysis of designated cross-species specific bispecific single chain constructs to CHO cells expressing human cMET as described in Example 27.1, the human CD3+ T cell line HPB-ALL, CHO cells expressing macaque cMET as described in Example 27.1 and the macaque T cell line 4119LnPx, respectively. The FAGS staining was performed as described in Example 27.2. The bold lines represent cells incubated with cell culture supernatant of transfected cells expressing the cross-species specific bispecific antibody constructs. The filled histograms show the negative controls. Supernatant of untransfected CHO cells was used as negative control. For each cross-species specific bispecific single chain construct the overlay of the histograms shows specific binding of the construct to human and macaque cMET and human and macaque CD3.

[0598] FIG. 55

[0599] The diagrams show results of chromium release assays measuring cytotoxic activity induced by designated cross-species specific cMET specific single chain constructs redirected to the indicated target cell line generated as described in Example 27.1. Effector cells were also used as indicated. The assays were performed as described in Example 27.4. The diagrams clearly demonstrate for each construct the potent recruitment of cytotoxic activity of macaque effector T cells against target cells positive for macaque cMET.

[0600] FIG. 56

[0601] FACS binding analysis of designated cross-species specific scFv antibodies to CHO cells expressing human cMET as described in Example 27.1 and CHO cells expressing macaque cMET as described in Example 27.1, respectively. The FAGS staining was performed as described in Example 27.3. The bold lines represent cells incubated with periplasmic preparations containing the cross-species specific scFv antibodies. The filled histograms show the negative controls. The Buffer used for periplasmic preparations was used as negative control. For each cross-species specific scFv antibody the overlay of the histograms shows specific binding of the construct to human and macaque cMET.

[0602] FIG. 57

[0603] FACS binding analysis of a cross-species specific scFv-antibody fragment to CHO cells transfected with human Endosialin and to CHO cells transfected with macaque Endosialin. The FACS staining was performed as described in Example 28.3. The bold lines represent cells incubated with a periplasmic preparation containing the scFv-antibody fragment. The thin lines represent the negative controls. Untransfected CHO cells were used as a negative control. The overlays of the histograms show specific binding of the scFv-antibody fragment to human and macaque Endosialin.

[0604] FIG. 58

[0605] FAGS binding analysis of designated cross-species specific bispecific single chain constructs to CHO cells transfected with human CD248, the human CD3+ T cell line HPB-ALL, CHO cells transfected with macaque CD248 and the macaque T cell line 4119LnPx, respectively. The FACS staining was performed as described in Example 29.1. The bold lines represent cells incubated with cell culture supernatant of transfected cells expressing the cross-species specific bispecific antibody constructs. The thin lines show the negative controls. Supernatant of untransfected CHO cells was used as negative control. For each cross-species specific bispecific single chain construct the overlay of the histograms shows specific binding of the construct to human and macaque CD248 and human and macaque CD3.

[0606] FIG. 59

[0607] The diagrams show results of chromium release assays measuring cytotoxic activity induced by designated cross-species specific CD248 specific single chain constructs redirected to the indicated target cell lines. Effector cells were also used as indicated. The assays were performed as described in Example 29.1. The diagrams clearly demonstrate for each construct the potent recruitment of cytotoxic activity of human and macaque effector T cells against target cells positive for human and macaque CD248, respectively.

[0608] FIG. 60

[0609] FAGS binding analysis of designated cross-species specific bispecific single chain constructs to CHO cells transfected with human EpCAM, human CD3+ T cell line HPB-ALL, and the macaque T cell line 4119 LnPx. The FACS staining was performed as described in Example 30.4. The thick line represents cells incubated with cell culture supernatant that were subsequently incubated with the anti-his antibody and the PE labeled detection antibody. The thin histogram line shows the negative control: cells only incubated with the anti-his antibody and the detection antibody.

[0610] FIG. 61

[0611] Cytotoxic activity induced by designated cross-species specific bispecific single chain constructs redirected to the indicated target cell lines. A) Stimulated CD4−/CD56− human PBMCs are used as effector cells, CHO cells transfected with human EpCAM as target cells. B) The macaque T cell line 4119 LnPx were used as effector cells, CHO cells transfected with human EpCAM as target cells. The assay was performed as described in Example 30.5.

[0612] FIG. 62

[0613] Cytotoxic activity induced by designated cross-species specific bispecific single chain constructs redirected to the indicated target cell lines. A) Stimulated CD4−/CD56− human PBMCs are used as effector cells, CHO cells transfected with human EpCAM as target cells. B) The macaque T cell line 4119 LnPx were used as effector cells, CHO cells transfected with human EpCAM as target cells. The assay was performed as described in Example 30.5.

[0614] FIG. 63

[0615] Cytotoxic activity induced by designated cross-species specific bispecific single chain constructs redirected to the indicated target cell lines. A) and B) Stimulated CD4−/CD56− human PBMCs are used as effector cells, CHO cells transfected with human EpCAM as target cells. The assay was performed as described in Example 30.5.

[0616] FIGS. 64 and 65

[0617] Cytotoxic activity induced by designated cross-species specific bispecific single chain constructs redirected to the indicated target cell lines. A) and B) The macaque T cell line 4119 LnPx were used as effector cells, CHO cells transfected with human EpCAM as target cells. The assay was performed as described in Example 30.5

[0618] FIG. 66

[0619] Cytotoxic activity induced by designated cross-species specific bispecific single chain constructs redirected to the indicated target cell lines. A) Stimulated CD4−/CD56− human PBMCs are used as effector cells, CHO cells transfected with human EpCAM as target cells. B) The macaque T cell line 4119 LnPx were used as effector cells, CHO cells transfected with human EpCAM as target cells. The assay was performed as described in Example 30.5

[0620] FIG. 67

[0621] FACS binding analysis of designated cross-species specific bispecific single chain constructs to CHO cells transfected with human, mouse or human-mouse hybrid EpCAM. The FACS staining was performed as described in Example 30.7. The bars represent the median fluorescence intensity of the designated constructs to the stated EpCAM antigens.

[0622] FIG. 68

[0623] In the FACS analysis, the indicated constructs showed binding to CD3 and FAPalpha compared to the negative control. Cross-species specificity of the bispecific antibodies to human and macaque CD3 and FAP alpha antigens, respectively, was demonstrated. The assay was performed as described in Example 31

[0624] FIG. 69

[0625] All of the generated cross-species specific bispecific single chain antibody constructs demonstrated cytotoxic activity against human FAPalpha positive target cells elicited by stimulated human CD4/CD56 depleted PBMC and macaque FAPalpha positive target cells elicited by the macaque T cell line 4119LnPx. The assay was performed as described in Example 31

[0626] FIG. 70

[0627] FACS binding analysis of designated cross-species specific bispecific single chain constructs to CHO cells transfected with human FAPalpha, the human CD3+ T cell line HPB-ALL, CHO cells transfected with macaque FAPalpha and the macaque T cell line 4119LnPx, respectively. The FACS staining was performed as described in Example 32.1. The bold lines represent cells incubated with cell culture supernatant of transfected cells expressing the cross-species specific bispecific antibody constructs. The thin lines show the negative controls. Supernatant of untransfected CHO cells was used as negative control. For each cross-species specific bispecific single chain construct the overlay of the histograms shows specific binding of the construct to human and macaque FAPalpha and human and macaque CD3.

[0628] FIG. 71

[0629] The diagrams show results of chromium release assays measuring cytotoxic activity induced by designated cross-species specific FAPalpha specific single chain constructs redirected to the indicated target cell lines. Effector cells were also used as indicated. The assays were performed as described in Example 32.1. The diagrams clearly demonstrate for each construct the potent recruitment of cytotoxic activity of human and macaque effector T cells against target cells positive for human and macaque FAPalpha, respectively.

[0630] FIG. 72

[0631] FACS binding analysis of designated cross-species specific scFv antibodies to CHO cells transfected with human FAPalpha and CHO cells transfected with macaque FAPalpha, respectively. The FACS staining was performed as described in Example 32.2. The bold lines represent cells incubated with periplasmic preparations containing the cross-species specific scFv antibodies. The filled histograms show the negative controls. The Buffer used for periplasmic preparations was used as negative control. For each cross-species specific scFv antibody the overlay of the histograms shows specific binding of the construct to human and macaque FAPalpha.

[0632] FIG. 73

[0633] FACS binding analysis of designated cross-species specific bispecific single chain constructs to CHO cells transfected with human IGF-1R, the human CD3+ T cell line HPB-ALL, CHO cells transfected with macaque IGF-1R and to the macaque T cell line 4119LnPx, respectively. The FACS staining was performed as described in Example 33.3. The bold lines represent cells incubated with cell culture supernatant of transfected cells expressing the cross-species specific bispecific antibody constructs. The filled histograms show the negative controls. Cell culture medium was used as negative control. For each cross-species specific bispecific single chain construct the overlay of the histograms shows specific binding of the construct to human and macaque IGF-1R and human and macaque CD3.

[0634] FIG. 74

[0635] The diagrams show results of chromium release assays measuring cytotoxic activity induced by designated cross-species specific bispecific single chain constructs redirected to the indicated target cell lines. Effector cells were also used as indicated. The assays were performed as described in Example 33.3. The diagrams clearly demonstrate for each construct the recruitment of cytotoxic activity of human and macaque effector T cells against target cells positive for human and macaque IGF-1R, respectively.

[0636] The present invention is additionally described by way of the following illustrative non-limiting examples that provide a better understanding of the present invention and of its many advantages.

### EXAMPLES

[0637] 1. Identification of CD3epsilon Sequences from Blood Samples of Non-Human Primates Blood samples of the following non-human primates were used for CD3epsilon-identification: Callithrix jacchus, Saguinus oedipus and Saimiris ciureus. Fresh heparin-treated whole blood samples were prepared for isolating total cellular RNA according to manufacturer's protocol (QIAamp RNA Blood Mini Kit, Qiagen). The extracted mRNA was transcribed into cDNA according to published protocols. In brief, 10 μl of precipitated RNA was incubated with 1.2 μl of 10× hexanucleotide mix (Roche) at 70° C. for 10 minutes and stored on ice. A reaction mix consisting of 4 μl of 5× superscript II buffer, 0.2 μl of 0.1M dithiothreitole, 0.8 μl of superscript II (Invitrogen), 1.2 μl of desoxyribonucleoside triphosphates (25 μM), 0.8 μl of RNase Inhibitor (Roche) and 1.8 μl of DNase and RNase free water (Roth) was added. The reaction mix was incubated at room temperature for 10 minutes followed by incubation at 42° C. for 50 minutes and at 90° C. for 5 minutes. The reaction was cooled on ice before adding 0.8 μl of RNaseH (1 U/μl, Roche) and incubated for 20 minutes at 37° C.

[0638] The first-strand cDNAs from each species were subjected to separate 35-cycle polymerase chain reactions using Taq DNA polymerase (Sigma) and the following primer combination designed on database research: forward primer 5′-AGAGTTCTGGGCCTCTGC-3′ (SEQ ID NO: 253); reverse primer 5′-CGGATGGGCTCATAGTCTG-3′ (SEQ ID NO: 254). The amplified 550 bp-bands were gel purified (Gel Extraction Kit, Qiagen) and sequenced (Sequiserve, Vaterstetten/Germany, see sequence listing).

CD3epsilon Callithrix jacchus
Nucleotides
CAGGACGGTAATGAAGAAATGGGTGATACTACACAGAACCCATATAAAGT
TTCCATCTCAGGAACCACAGTAACACTGACATGCCCTCGGTATGATGGAC
ATGAAATAAAATGGCTCGTAAATAGTCAAAACAAAGAAGGTCATGAGGAC
CACCTGTTACTGGAGGACTTTTCGGAAATGGAGCAAAGTGGTTATTATGC
CTGCCTCTCCAAAGAGACTCCCGCAGAAGAGGCGAGCCATTATCTCTACC
TGAAGGCAAGAGTGTGTGAGAACTGCGTGGAGGTGGAT
Amino acids
(SEQ ID NO: 3)
QDGNEEMGDTTQNPYKVSISGTTVTLTCPRYDGHEIKWLVNSQNKEGHED
HLLLEDFSEMEQSGYYACLSKETPAEEASHYLYLKARVCENCVEVD
CD3epsilon Saguinus oedipus
Nucleotides
CAGGACGGTAATGAAGAAATGGGTGATACTACACAGAACCCATATAAAGT
TTCCATCTCAGGAACCACAGTAACACTGACATGCCCTCGGTATGATGGAC
ATGAAATAAAATGGCTTGTAAATAGTCAAAACAAAGAAGGTCATGAGGAC
CACCTGTTACTGGAGGATTTTTCGGAAATGGAGCAAAGTGGTTATTATGC
CTGCCTCTCCAAAGAGACTCCCGCAGAAGAGGCGAGCCATTATCTCTACC
TGAAGGCAAGAGTGTGTGAGAACTGCGTGGAGGTGGAT
Amino acids
(SEQ ID NO: 5)
QDGNEEMGDTTQNPYKVSISGTTVTLTCPRYDGHEIKWLVNSQNKEGHED
HLLLEDFSEMEQSGYYACLSKETPAEEASHYLYLKARVCENCVEVD
CD3epsilon Saimiris ciureus
Nucleotides
CAGGACGGTAATGAAGAGATTGGTGATACTACCCAGAACCCATATAAAGT
TTCCATCTCAGGAACCACAGTAACACTGACATGCCCTCGGTATGATGGAC
AGGAAATAAAATGGCTCGTAAATGATCAAAACAAAGAAGGTCATGAGGAC
CACCTGTTACTGGAAGATTTTTCAGAAATGGAACAAAGTGGTTATTATGC
CTGCCTCTCCAAAGAGACCCCCACAGAAGAGGCGAGCCATTATCTCTACC
TGAAGGCAAGAGTGTGTGAGAACTGCGTGGAGGTGGAT
Amino acids
(SEQ ID NO: 7)
QDGNEEIGDTTQNPYKVSISGTTVTLTCPRYDGQEIKWLVNDQNKEGHED
HLLLEDFSEMEQSGYYACLSKETPTEEASHYLYLKARVCENCVEVD

2. Generation of Cross-Species Specific Single Chain Antibody Fragments (scFv) Binding to the N-Terminal Amino Acids 1-27 of CD3epsilon of Man and Different Non-Chimpanzee Primates
2.1. Immunization of Mice Using the N-Terminus of CD3epsilon Separated from its Native CD3-Context by Fusion to a Heterologous Soluble Protein

[0639] Ten weeks old F1 mice from balb/c×C57black crossings were immunized with the CD3epsilon-Fc fusion protein carrying the most N-terminal amino acids 1-27 of the mature CD3epsilon chain (1-27 CD3-Fc) of man and/or Saimiris ciureus. To this end 40 μg of the 1-27 CD3-Fc fusion protein with 10 nmol of a thioate-modified CpG-Oligonucleotide (5′-tccatgacgttcctgatgct-3′) (SEQ ID No. 343) in 300 ul PBS were injected per mouse intra-peritoneally. Mice receive booster immunizations after 21, 42 and optionally 63 days in the same way. Ten days after the first booster immunization, blood samples were taken and antibody serum titer against 1-27 CD3-Fc fusion protein iwa tested by ELISA. Additionally, the titer against the CD3-positive human T cell line HPBall was tested in flow cytometry according to standard protocols. Serum titers were significantly higher in immunized than in non-immunized animals.

2.2. Generation of an Immune Murine Antibody scFv Library: Construction of a Combinatorial Antibody Library and Phage Display

[0640] Three days after the last injection the murine spleen cells were harvested for the preparation of total RNA according to standard protocols.

[0641] A library of murine immunoglobuline (Ig) light chain (kappa) variable region (VK) and Ig heavy chain variable region (VH) DNA-fragments was constructed by RT-PCR on murine spleen RNA using VK- and VH specific primer. cDNA was synthesized according to standard protocols.

[0642] The primers were designed in a way to give rise to a 5′-XhoI and a 3′-BstEII recognition site for the amplified heavy chain V-fragments and to a 5′-SacI and a 3′-SpeI recognition site for amplified VK DNA fragments.

[0643] For the PCR-amplification of the VH DNA-fragments eight different 5′-VH-family specific primers (MVH1(GC)AG GTG CAG CTC GAG GAG TCA GGA CCT (SEQ ID No. 344); MVH2 GAG GTC CAG CTC GAG CAG TCT GGA CCT (SEQ ID No. 345); MVH3 CAG GTC CAA CTC GAG CAG CCT GGG GCT (SEQ ID No. 346); MVH4 GAG GTT CAG CTC GAG CAG TCT GGG GCA (SEQ ID No. 347); MVH5 GA(AG) GTG AAG CTC GAG GAG TCT GGA GGA (SEQ ID No. 348); MVH6 GAG GTG AAG CTT OTC GAG TCT GGA GGT (SEQ ID No. 349); MVH7 GAA GTG AAG CTC GAG GAG TCT GGG GGA (SEQ ID No. 350); MVH8 GAG GTT CAG CTC GAG CAG TCT GGA GCT (SEQ ID No. 351)) were each combined with one 3′-VH primer (3′MuVHBstEII tga gga gac ggt gac cgt ggt ccc ttg gcc cca g (SEQ ID No. 352)); for the PCR amplification of the VK-chain fragments seven different 5′-VK-family specific primers (MUVK1 CCA GTT CCG AGC TCG TTG TGA CTC AGG AAT CT (SEQ ID No. 353); MUVK2 CCA GTT CCG AGC TCG TGT TGA CGC AGC CGC CC (SEQ ID No. 354); MUVK3 CCA GTT CCG AGC TCG TGC TCA CCC AGT CTC CA (SEQ ID No. 355); MUVK4 CCA GTT CCG AGC TCC AGA TGA CCC AGT CTC CA (SEQ ID No. 356); MUVK5 CCA GAT GTG AGC TOG TGA TGA CCC AGA CTC CA (SEQ ID No. 357); MUVK6 CCA GAT GTG AGC TCG TCA TGA CCC AGT CTC CA (SEQ ID No. 358); MUVK7 CCA GTT CCG AGC TCG TGA TGA CAC AGT CTC CA (SEQ ID No. 359)) were each combined with one 3′-VK primer (3′MuVkHindIII/BsiW1 tgg tgc act agt cgt acg ttt gat ctc aag ctt ggt ccc (SEQ ID No. 360)).

[0644] The following PCR program was used for amplification: denaturation at 94° C. for 20 sec; primer annealing at 52° C. for 50 sec and primer extension at 72° C. for 60 sec and 40 cycles, followed by a 10 min final extension at 72° C.

[0645] 450 ng of the kappa light chain fragments (SacI-SpeI digested) were ligated with 1400 ng of the phagemid pComb3H5Bhis (SacI-SpeI digested; large fragment). The resulting combinatorial antibody library was then transformed into 300 ul of electrocompetent Escherichia coli XL1 Blue cells by electroporation (2.5 kV, 0.2 cm gap cuvette, 25 uFD, 200 Ohm, Biorad gene-pulser) resulting in a library size of more than 10⁷ independent clones. After one hour of phenotype expression, positive transformants were selected for carbenicilline resistance encoded by the pComb3H5BHis vector in 100 ml of liquid super broth (SB)-culture over night. Cells were then harvested by centrifugation and plasmid preparation was carried out using a commercially available plasmid preparation kit (Qiagen).

[0646] 2800 ng of this plasmid-DNA containing the VK-library (XhoI-BstEII digested; large fragment) were ligated with 900 ng of the heavy chain V-fragments (XhoI-BstEII digested) and again transformed into two 300 ul aliquots of electrocompetent E. coli XL1 Blue cells by electroporation (2.5 kV, 0.2 cm gap cuvette, 25 uFD, 200 Ohm) resulting in a total VH-VK scFv (single chain variable fragment) library size of more than 10⁷ independent clones.

[0647] After phenotype expression and slow adaptation to carbenicillin, the E. coli cells containing the antibody library were transferred into SB-Carbenicillin (50 ug/mL) selection medium. The E. coli cells containing the antibody library wass then infected with an infectious dose of 10¹² particles of helper phage VCSM13 resulting in the production and secretion of filamentous M13 phage, wherein phage particle contains single stranded pComb3H5BHis-DNA encoding a murine scFv-fragment and displayed the corresponding scFv-protein as a translational fusion to phage coat protein III. This pool of phages displaying the antibody library was later used for the selection of antigen binding entities.

### 2.3. Phage Display Based Selection of CD3-Specific Binders

[0648] The phage library carrying the cloned scFv-repertoire was harvested from the respective culture supernatant by PEG8000/NaCl precipitation and centrifugation. Approximately 10¹¹ to 10¹² scFv phage particles were resuspended in 0.4 ml of PBS/0.1% BSA and incubated with 10⁵ to 10⁷ Jurkat cells (a CD3-positive human T-cell line) for 1 hour on ice under slow agitation. These Jurkat cells were grown beforehand in RPMI medium enriched with fetal calf serum (10%), glutamine and penicillin/streptomycin, harvested by centrifugation, washed in PBS and resuspended in PBS/1% FCS (containing Na Azide). scFv phage which do not specifically bind to the Jurkat cells were eliminated by up to five washing steps with PBS/1% FCS (containing Na Azide). After washing, binding entities were eluted from the cells by resuspending the cells in HCl-glycine pH 2.2 (10 min incubation with subsequent vortexing) and after neutralization with 2 M Tris pH 12, the eluate was used for infection of a fresh uninfected E. coli XL1 Blue culture (OD600>0.5). The E. coli culture containing E. coli cells successfully transduced with a phagemid copy, encoding a human scFv-fragment, were again selected for carbenicillin resistance and subsequently infected with VCMS 13 helper phage to start the second round of antibody display and in vitro selection. A total of 4 to 5 rounds of selections were carried out, normally.

2.4. Screening for CD3-Specific Binders Plasmid DNA corresponding to 4 and 5 rounds of panning was isolated from E. coli cultures after selection. For the production of soluble scFv-protein, VH-VL-DNA fragments were excised from the plasmids (XhoI-SpeI). These fragments were cloned via the same restriction sites in the plasmid pComb3H5BFlag/His differing from the original pComb3H5BHis in that the expression construct (e.g. scFv) includes a Flag-tag (TGD YKDDDDK) between the scFv and the His6-tag and the additional phage proteins were deleted. After ligation, each pool (different rounds of panning) of plasmid DNA was transformed into 100 μl heat shock competent E. coli TG1 or XLI blue and plated onto carbenicillin LB-agar. Single colonies were picked into 100 ul of LB carb (50 ug/ml).

[0649] E. coli transformed with pComb3H5BHis containing a VL- and VH-segment produce soluble scFv in sufficient amounts after excision of the gene III fragment and induction with 1 mM IPTG. Due to a suitable signal sequence, the scFv-chain was exported into the periplasma where it folds into a functional conformation.

[0650] Single E. coli TG1 bacterial colonies from the transformation plates were picked for periplasmic small scale preparations and grown in SB-medium (e.g. 10 nil) supplemented with 20 mM MgCl2 and carbenicillin 50 μg/ml (and re-dissolved in PBS (e.g. 1 ml) after harvesting. By four rounds of freezing at −70° C. and thawing at 37° C., the outer membrane of the bacteria was destroyed by temperature shock and the soluble periplasmic proteins including the scFvs were released into the supernatant. After elimination of intact cells and cell-debris by centrifugation, the supernatant containing the human anti-human CD3-scFvs was collected and used for further examination.

### 2.5. Identification of CD3-Specific Binders

[0651] Binding of the isolated scFvs was tested by flow cytometry on eukaryotic cells, which on their surface express a heterologous protein displaying at its N-terminus the first 27 N-terminal amino acids of CD3epsilon.

[0652] As described in Example 4, the first amino acids 1-27 of the N-terminal sequence of the mature CD3 epsilon chain of the human T cell receptor complex (amino acid sequence: QDGNEEMGGITQTPYKVSISGTTVILT SEQ ID NO: 2) were fused to the N-terminus of the transmembrane protein EpCAM so that the N-terminus was located at the outer cell surface. Additionally, a FLAG epitope was inserted between the N-terminal 1-27 CD3epsilon sequence and the EpCAM sequence. This fusion product was expressed in human embryonic kidney (HEK) and chinese hamster ovary (CHO) cells.

[0653] Eukaryotic cells displaying the 27 most N-terminal amino acids of mature CD3epsilon of other primate species were prepared in the same way for Saimiri ciureus (Squirrel monkey) (CD3 epsilon N-terminal amino acid sequence: QDGNEEIGDTTQNPYKVSISGTTVTLT SEQ ID NO: 8), for Callithrix jacchus (CD3 epsilon N-terminal amino acid sequence: QDGNEEMGDTTQNPYKVSISGTTVTLT SEQ ID NO: 4) and for Saguinus oedipus (CD3 epsilon N-terminal amino acid sequence: QDGNEEMGDTTQNPYKVSISGTTVTLT SEQ ID NO: 6).

[0654] For flow cytometry 2.5×10⁵ cells are incubated with 50 ul supernatant or with 5 μg/ml of the purified constructs in 50 μl PBS with 2% FCS. The binding of the constructs was detected with an anti-His antibody (Penta-His Antibody, BSA free, Qiagen GmbH, Hilden, FRG) at 2 μg/ml in 50 μl PBS with 2% FCS. As a second step reagent a R-Phycoerythrin-conjugated affinity purified F(ab′)2 fragment, goat anti-mouse IgG (Fc-gamma fragment specific), diluted 1:100 in 50 μl PBS with 2% FCS (Dianova, Hamburg, FRG) was used. The samples were measured on a FACSscan (BD biosciences, Heidelberg, FRG).

[0655] Binding was always confirmed by flowcytometry as described in the foregoing paragraph on primary T cells of man and different primates (e.g. Saimiris ciureus, Callithrix jacchus, Saguinus oedipus).

2.6. Generation of Human/Humanized Equivalents of Non-Human CD3epsilon Specific scFvs

[0656] The VH region of the murine anti-CD3 scFv was aligned against human antibody germline amino acid sequences. The human antibody germline VH sequence was chosen which has the closest homology to the non-human VH and a direct alignment of the two amino acid sequences was performed. There were a number of framework residues of the non-human VH that differ from the human VH framework regions (“different framework positions”). Some of these residues may contribute to the binding and activity of the antibody to its target.

[0657] To construct a library that contain the murine CDRs and at every framework position that differs from the chosen human VH sequence both possibilities (the human and the maternal murine amino acid residue), degenerated oligonucleotides were synthesized. These oligonucleotides incorporate at the differing positions the human residue with a probability of 75% and the murine residue with a probability of 25%. For one human VH e.g. six of these oligonucleotides had to be synthesized that overlap in a terminal stretch of approximately 20 nucleotides. To this end every second primer was an antisense primer. Restriction sites needed for later cloning within the oligonucleotides were deleted.

[0658] These primers may have a length of 60 to 90 nucleotides, depending on the number of primers that were needed to span over the whole V sequence.

[0659] These e.g. six primers were mixed in equal amounts (e.g. 1 μl of each primer (primer stocks 20 to 100 μM) to a 20 μl PCR reaction) and added to a PCR mix consisting of PCR buffer, nucleotides and Taq polymerase. This mix was incubated at 94° C. for 3 minutes, 65° C. for 1 minute, 62° C. for 1 minute, 59° C. for 1 minute, 56° C. for 1 minute, 52° C. for 1 minute, 50° C. for 1 minute and at 72° C. for 10 minutes in a PCR cycler. Subsequently the product was run in an agarose gel electrophoresis and the product of a size from 200 to 400 isolated from the gel according to standard methods.

[0660] This PCR product was then used as a template for a standard PCR reaction using primers that incorporate N-terminal and C-terminal suitable cloning restriction sites. The DNA fragment of the correct size (for a VH approximately 350 nucleotides) was isolated by agarose gel electrophoresis according to standard methods. In this way sufficient VH DNA fragment was amplified. This VH fragment was now a pool of VH fragments that have each one a different amount of human and murine residues at the respective differing framework positions (pool of humanized VH). The same procedure was performed for the VL region of the murine anti-CD3 scFv (pool of humanized VL).

[0661] The pool of humanized VH was then combined with the pool of humanized VL in the phage display vector pComb3H5Bhis to form a library of functional scFvs from which—after display on filamentous phage—anti-CD3 binders were selected, screened, identified and confirmed as described above for the parental non-human (murine) anti-CD3 scFv. Single clones were then analyzed for favorable properties and amino acid sequence. Those scFvs which were closest in amino acid sequence homology to human germline V-segments are preferred particularly those wherein at least one CDR among CDR I and II of VH and CDR I and II of VLkappa or CDR I and II of VLlambda shows more than 80% amino acid sequence identity to the closest respective CDR of all human germline V-segments. Anti-CD3 scFvs were converted into recombinant bispecific single chain antibodies as described in the following Examples 9, 16, and 24.

### 3. Generation of a Recombinant Fusion Protein of the N-Terminal Amino Acids 1-27 of the Human CD3 Epsilon Chain Fused to the Fc-Part of an IgG1 (1-27 CD3-Fc).

### 3.1. Cloning and Expression of 1-27 CD3-Fc

[0662] The coding sequence of the 1-27 N-terminal amino acids of the human CD3 epsilon chain fused to the hinge and Fc gamma region of human immunoglobulin IgG1 as well as an 6 Histidine Tag were obtained by gene synthesis according to standard protocols (cDNA sequence and amino acid sequence of the recombinant fusion protein are listed under SEQ ID NOs 230 and 229). The gene synthesis fragment was designed as to contain first a Kozak site for eukaryotic expression of the construct, followed by an 19 amino acid immunoglobulin leader peptide, followed in frame by the coding sequence of the first 27 amino acids of the extracellular portion of the mature human CD3 epsilon chain, followed in frame by the coding sequence of the hinge region and Fc gamma portion of human IgG1, followed in frame by the coding sequence of a 6 Histidine tag and a stop codon (FIG. 1). The gene synthesis fragment was also designed as to introduce restriction sites at the beginning and at the end of the cDNA coding for the fusion protein. The introduced restriction sites, EcoRI at the 5′ end and SalI at the 3′ end, are utilized in the following cloning procedures. The gene synthesis fragment was cloned via EcoRI and SalI into a plasmid designated pEF-DHFR (pEF-DHFR is described in Mack et al. Proc. Natl. Acad. Sci. USA 92 (1995) 7021-7025 and Raum et al. Cancer Immunol Immunother 50 (2001) 141-150) following standard protocols. A sequence verified plasmid was used for transfection in the FreeStyle 293 Expression System (Invitrogen GmbH, Karlsruhe, Germany) according to the manufacturers protocol. After 3 days cell culture supernatants of the transfectants were harvested and tested for the presence of the recombinant construct in an ELISA assay. Goat anti-human IgG, Fc-gamma fragment specific antibody (obtained from Jackson ImmunoResearch Europe Ltd., Newmarket, Suffolk, UK) was diluted in PBS to 5 μg/ml and coated with 100 μl per well onto a MaxiSorp 96-well ELISA plate (Nunc GmbH & Co. KG, Wiesbaden, Germany) over night at 4° C. Wells were washed with PBS with 0.05% Tween 20 (PBS/Tween and blocked with 3% BSA in PBS (bovine Albumin, fraction V, Sigma-Aldrich Chemie GmbH, Taufkirchen, Germany) for 60 minutes at room temperature (RT). Subsequently, wells were washed again PBS/Tween and then incubated with cell culture supernatants for 60 minutes at RT. After washing wells were incubated with a peroxidase conjugated anti-His6 antibody (Roche Diagnostics GmbH, Roche Applied Science, Mannheim, Germany) diluted 1:500 in PBS with 1% BSA for 60 minutes at RT. Subsequently, wells were washed with 200 μl PBS/Tween and 100 μl of the SIGMAFAST OPD (SIGMAFAST OPD [o-Phenylenediamine dihydrochloride] substrate solution (Sigma-Aldrich Chemie GmbH, Taufkirchen, Germany) was added according to the manufacturers protocol. The reaction was stopped by adding 100 μl 1 M H₂SO₄. Color reaction was measured on a PowerWaveX microplate spectrophotometer (BioTek Instruments, Inc., Winooski, Vt., USA) at 490 nm and subtraction of background absorption at 620 nm. As shown in FIG. 2 presence of the construct as compared to irrelevant supernatant of mock-transfected HEK 293 cells used as negative control was clearly detectable.

### 3.2. Binding Assay of Cross-Species Specific Single Chain Antibodies to 1-27 CD3-Fc.

[0663] Binding of crude preparations of periplasmatically expressed cross-species specific single chain antibodies specific for CD3 epsilon to 1-27 CD3-Fc was tested in an ELISA assay. Goat anti-human IgG, Fc-gamma fragment specific antibody (Jackson ImmunoResearch Europe Ltd., Newmarket, Suffolk, UK) was diluted in PBS to 5 μg/ml and coated with 100 μl per well onto a MaxiSorp 96-well ELISA plate (Nunc GmbH & Co. KG, Wiesbaden, Germany) over night at 4° C. Wells were washed with PBS with 0.05% Tween 20 (PBS/Tween and blocked with PBS with 3% BSA (bovine Albumin, fraction V, Sigma-Aldrich Chemie GmbH, Taufkirchen, Germany) for 60 minutes at RT. Subsequently, wells were washed with PBS/Tween and incubated with supernatants of cells expressing the 1-27 CD3-Fc construct for 60 minutes at RT. Wells were washed with PBS/Tween and incubated with crude preparations of periplasmatically expressed cross-species specific single-chain antibodies as described above for 60 minutes at room temperature. After washing with PBS/Tween wells were incubated with peroxidase conjugated anti-Flag M2 antibody (Sigma-Aldrich Chemie GmbH, Taufkirchen, Germany) diluted 1:10000 in PBS with 1% BSA for 60 minutes at RT. Wells were washed with PBS/Tween and incubated with 100 μl of the SIGMAFAST OPD (OPD [o-Phenylenediamine dihydrochloride] substrate solution (Sigma-Aldrich Chemie GmbH, Taufkirchen, Germany) according to the manufacturers protocol. Color reaction was stopped with 100 μl 1 M H₂SO₄ and measured on a PowerWaveX microplate spectrophotometer (BioTek Instruments, Inc., Winooski, Vt., USA) at 490 nm and subtraction of background absorption at 620 nm. Strong binding of cross-species specific human single chain antibodies specific for CD3 epsilon to the 1-27 CD3-Fc construct compared to a murine anti CD3 single-chain antibody was observed (FIG. 3).

4. Generation of Recombinant Transmembrane Fusion Proteins of the N-Terminal Amino Acids 1-27 of CD3 Epsilon from Different Non-Chimpanzee Primates Fused to EpCAM from Cynomolgus Monkey (1-27 CD3-EpCAM).

### 4.1. Cloning and Expression of 1-27 CD3-EpCAM

[0664] CD3 epsilon was isolated from different non-chimpanzee primates (marmoset, tamarin, squirrel monkey) and swine. The coding sequences of the 1-27 N-terminal amino acids of CD3 epsilon chain of the mature human, common marmoset (Callithrix jacchus), cottontop tamarin (Saguinus oedipus), common squirrel monkey (Saimiri sciureus) and domestic swine (Sus scrofa; used as negative control) fused to the N-terminus of Flag tagged cynomolgus EpCAM were obtained by gene synthesis according to standard protocols. cDNA sequence and amino acid sequence of the recombinant fusion proteins are listed under SEQ ID NOs 231 to 240). The gene synthesis fragments were designed as to contain first a BsrGI site to allow fusion in correct reading frame with the coding sequence of a 19 amino acid immunoglobulin leader peptide already present in the target expression vector, which is followed in frame by the coding sequence of the N-terminal 1-27 amino acids of the extracellular portion of the mature CD3 epsilon chains, which is followed in frame by the coding sequence of a Flag tag and followed in frame by the coding sequence of the mature cynomolgus EpCAM transmembrane protein (FIG. 4). The gene synthesis fragments were also designed to introduce a restriction site at the end of the cDNA coding for the fusion protein. The introduced restriction sites BsrGI at the 5′ end and SalI at the 3′ end, were utilized in the following cloning procedures. The gene synthesis fragments were then cloned via BsrGI and SalI into a derivative of the plasmid designated pEF DHFR (pEF-DHFR is described in Mack et al. Proc. Natl. Acad. Sci. USA 92 (1995) 7021-7025), which already contained the coding sequence of the 19 amino acid immunoglobulin leader peptide following standard protocols. Sequence verified plasmids were used to transiently transfect 293-HEK cells using the MATra-A Reagent (IBA GmbH, Gottingen, Germany) and 12 μg of plasmid DNA for adherent 293-HEK cells in 175 ml cell culture flasks according to the manufacturers protocol. After 3 days of cell culture the transfectants were tested for cell surface expression of the recombinant transmembrane protein via an FAGS assay according to standard protocols. For that purpose a number of 2.5×10⁵ cells were incubated with the anti-Flag M2 antibody (Sigma-Aldrich Chemie GmbH, Taufkirchen, Germany) at 5 μg/ml in PBS with 2% FCS. Bound antibody was detected with an R-Phycoerythrin-conjugated affinity purified F(ab′)2 fragment, goat anti-mouse IgG, Fc-gamma fragment specific 1:100 in PBS with 2% FCS (Jackson ImmunoResearch Europe Ltd., Newmarket, Suffolk, UK). The samples were measured on a FACScalibur (BD biosciences, Heidelberg, Germany). Expression of the Flag tagged recombinant transmembrane fusion proteins consisting of cynomolgus EpCAM and the 1-27 N-terminal amino acids of the human, marmoset, tamarin, squirrel monkey and swine CD3 epsilon chain respectively on transfected cells was clearly detectable (FIG. 5).

### 4.2. Binding of Cross-Species Specific Anti-CD3 Single Chain Antibodies to the 1-27 CD3-EpCAM

[0665] Binding of crude preparations of periplasmatically expressed cross-species specific anti CD3 single-chain antibodies to the 1-27 N-terminal amino acids of the human, marmoset, tamarin and squirrel monkey CD3 epsilon chains respectively fused to cynomolgus Ep-CAM was tested in an FACS assay according to standard protocols. For that purpose a number of 2.5×10⁵ cells were incubated with crude preparations of periplasmatically expressed cross-species specific anti CD3 single-chain antibodies (preparation was performed as described above and according to standard protocols) and a single-chain murine anti-human CD3 antibody as negative control. As secondary antibody the Penta-His antibody (Qiagen GmbH, Hildesheim, Germany) was used at 5 μg/ml in 50 μl PBS with 2% FCS. The binding of the antibody was detected with an R-Phycoerythrin-conjugated affinity purified F(ab′)2 fragment, goat anti-mouse IgG, Fc-gamma fragment specific, diluted 1:100 in PBS with 2% FCS (Jackson ImmunoResearch Europe Ltd., Newmarket, Suffolk, UK). The samples were measured on a FACScalibur (BD biosciences, Heidelberg, Germany). As shown in FIGS. 6 (A to E) binding of single chain antibodies to the transfectants expressing the recombinant transmembrane fusion proteins consisting of the 1-27 N-terminal amino acids of CD3 epsilon of the human, marmoset, tamarin or squirrel monkey fused to cynomolgus EpCAM was observed. No binding of cross-species specific single chain antibodies was observed to a fusion protein consisting of the 1-27 N-terminal CD3 epsilon of swine fused to cynomolgus EpCAM used as negative control. Multi-primate cross-species specificity of the anti-CD3 single chain antibodies was shown. Signals obtained with the anti Flag M2 antibody and the cross-species specific single chain antibodies were comparable, indicating a strong binding activity of the cross-species specific single chain antibodies to the N-terminal amino acids 1-27 of CD3 epsilon.

5. Binding Analysis of Cross-Species Specific Anti-CD3 Single Chain Antibodies by Alanine-Scanning of Mouse Cells Transfected with the Human CD3 Epsilon Chain and its Alanine Mutants

### 5.1. Cloning and Expression of Human Wild-Type CD3 Epsilon

[0666] The coding sequence of the human CD3 epsilon chain was obtained by gene synthesis according to standard protocols (cDNA sequence and amino acid sequence of the human CD3 epsilon chain are listed under SEQ ID NOs 242 and 241). The gene synthesis fragment was designed as to contain a Kozak site for eukaryotic expression of the construct and restriction sites at the beginning and the end of the cDNA coding for human CD3 epsilon. The introduced restriction sites EcoRI at the 5′ end and SalI at the 3′ end, were utilized in the following cloning procedures. The gene synthesis fragment was then cloned via EcoRI and SalI into a plasmid designated pEF NEO following standard protocols. pEF NEO was derived of pEF DHFR (Mack et al. Proc. Natl. Acad. Sci. USA 92 (1995) 7021-7025) by replacing the cDNA of the DHFR with the cDNA of the neomycin resistance by conventional molecular cloning. A sequence verified plasmid was used to transfect the murine T cell line EL4 (ATCC No. TIB-39) cultivated in RPMI with stabilized L-glutamine supplemented with 10% FCS, 1% penicillin/streptomycin, 1% HEPES, 1% pyruvate, 1% non-essential amino acids (all Biochrom AG Berlin, Germany) at 37° C., 95% humidity and 7% CO₂. Transfection was performed with the SuperFect Transfection Reagent (Qiagen GmbH, Hilden, Germany) and 2 μg of plasmid DNA according to the manufacturer's protocol. After 24 hours the cells were washed with PBS and cultivated again in the aforementioned cell culture medium with 600 μg/ml G418 for selection (PAA Laboratories GmbH, Pasching, Austria). 16 to 20 days after transfection the outgrowth of resistant cells was observed. After additional 7 to 14 days cells were tested for expression of human CD3 epsilon by FACS analysis according to standard protocols. 2.5×10⁵ cells were incubated with anti-human CD3 antibody UCHT-1 (BD biosciences, Heidelberg, Germany) at 5 μg/ml in PBS with 2% FCS. The binding of the antibody was detected with an R-Phycoerythrin-conjugated affinity purified F(ab′)2 fragment, goat anti-mouse IgG, Fc-gamma fragment specific, diluted 1:100 in PBS with 2% FCS (Jackson ImmunoResearch Europe Ltd., Newmarket, Suffolk, UK). The samples were measured on a FACSCalibur (BD biosciences, Heidelberg, Germany). Expression of human wild-type CD3 on transfected EL4 cells is shown in FIG. 7.

### 5.2. Cloning and Expression of the Cross-Species Specific Anti-CD3 Single Chain Antibodies as IgG1 Antibodies

[0667] In order to provide improved means of detection of binding of the cross-species specific single chain anti-CD3 antibodies H2C HLP, A2J HLP and E2M HLP were converted into IgG1 antibodies with murine IgG1 and human lambda constant regions. cDNA sequences coding for the heavy and light chains of respective IgG antibodies were obtained by gene synthesis according to standard protocols. The gene synthesis fragments for each specificity were designed as to contain first a Kozak site to allow eukaryotic expression of the construct, which is followed by an 19 amino acid immunoglobulin leader peptide (SEQ ID NOs 244 and 243), which is followed in frame by the coding sequence of the respective heavy chain variable region or respective light chain variable region, followed in frame by the coding sequence of the heavy chain constant region of murine IgG1 (SEQ ID NOs 246 and 245) or the coding sequence of the human lambda light chain constant region (SEQ ID NO 248 and 247), respectively. Restriction sites were introduced at the beginning and the end of the cDNA coding for the fusion protein. Restriction sites EcoRI at the 5′ end and SalI at the 3′ end were used for the following cloning procedures. The gene synthesis fragments were cloned via EcoRI and SalI into a plasmid designated pEF DHFR (Mack et al. Proc. Natl. Acad. Sci. USA 92 (1995) 7021-7025) for the heavy chain constructs and pEF ADA (pEF ADA is described in Raum et al., Cancer Immunol Immunother., 50(3), (2001), 141-50) for the light chain constructs) according to standard protocols. Sequence verified plasmids were used for co-transfection of respective light and heavy chain constructs in the FreeStyle 293 Expression System (Invitrogen GmbH, Karlsruhe, Germany) according to the manufacturers protocol. After 3 days cell culture supernatants of the transfectants were harvested and used for the alanine-scanning experiment.

### 5.3. Cloning and Expression of Alanine Mutants of Human CD3 Epsilon for Alanine-Scanning

[0668] 27 cDNA fragments coding for the human CD3 epsilon chain with an exchange of one codon of the wild-type sequence of human CD3 epsilon into a codon coding for alanine (GCC) for each amino acid of amino acids 1-27 of the extracellular domain of the mature human CD3 epsilon chain respectively were obtained by gene synthesis. Except for the exchanged codon the cDNA fragments were identical to the aforementioned human wild-type CD3 cDNA fragment. Only one codon was replaced in each construct compared to the human wild-type CD3 cDNA fragment described above. Restriction sites EcoRI and SalI were introduced into the cDNA fragments at identical positions compared to the wild-type construct. All alanine-scanning constructs were cloned into pEF NEO and sequence verified plasmids were transfected into EL4 cells. Transfection and selection of transfectants was performed as described above. As result a panel of expressed constructs was obtained wherein the first amino acid of the human CD3 epsilon chain, glutamine (Q, Gln) at position 1 was replaced by alanine. The last amino acid replaced by alanine was the threonine (T, Thr) at position 27 of mature human wild-type CD3 epsilon. For each amino acid between glutamine 1 and threonine 27 respective transfectants with an exchange of the wild-type amino acid into alanine were generated.

### 5.4. Alanine-Scanning Experiment

[0669] Chimeric IgG antibodies as described in 5.2 and cross-species specific single chain antibodies specific for CD3 epsilon were tested in alanine-scanning experiment. Binding of the antibodies to the EL4 cell lines transfected with the alanine-mutant constructs of human CD3 epsilon as described in 5.3 was tested by FAGS assay according to standard protocols. 2.5×10⁵ cells of the respective transfectants were incubated with 50 μl of cell culture supernatant containing the chimeric IgG antibodies or with 50 μl of crude preparations of periplasmatically expressed single-chain antibodies. For samples incubated with crude preparations of periplasmatically expressed single-chain antibodies the anti-Flag M2 antibody (Sigma-Aldrich Chemie GmbH, Taufkirchen, Germany) was used as secondary antibody at 5 μg/rd in 50 μl PBS with 2% FCS. For samples incubated with the chimeric IgG antibodies a secondary antibody was not necessary. For all samples the binding of the antibody molecules was detected with an R-Phycoerythrin-conjugated affinity purified F(ab′)2 fragment, goat anti-mouse IgG, Fc-gamma fragment specific, diluted 1:100 in PBS with 2% FCS (Jackson ImmunoResearch Europe Ltd., Newmarket, Suffolk, UK). Samples were measured on a FACSCalibur (BD biosciences, Heidelberg, Germany). Differential binding of chimeric IgG molecules or cross-species specific single-chain antibodies to the EL4 cell lines transfected with the alanine-mutants of human CD3 epsilon was detected. As negative control either an isotype control or a crude preparation of a periplasmatically expressed single-chain antibody of irrelevant specificity was used respectively. UCHT-1 antibody was used as positive control for the expression level of the alanine-mutants of human CD3 epsilon. The EL4 cell lines transfected with the alanine-mutants for the amino acids tyrosine at position 15, valine at position 17, isoleucine at position 19, valine at position 24 or leucine at position 26 of the mature CD3 epsilon chain were not evaluated due to very low expression levels (data not shown). Binding of the cross-species specific single chain antibodies and the single chain antibodies in chimeric IgG format to the EL4 cell lines transfected with the alanine-mutants of human CD3 epsilon is shown in FIG. 8 (A-D) as relative binding in arbitrary units with the geometric mean fluorescence values of the respective negative controls subtracted from all respective geometric mean fluorescence sample values. To compensate for different expression levels all sample values for a certain transfectant were then divided through the geometric mean fluorescence value of the UCHT-1 antibody for the respective transfectant. For comparison with the wild-type sample value of a specificity all sample values of the respective specificity were finally divided through the wild-type sample value, thereby setting the wild-type sample value to 1 arbitrary unit of binding.

[0670] The calculations used are shown in detail in the following formula:

$$value\_Sample ( x , y ) = \frac{Sample ( x , y ) - neg\_Contr . ( x )}{\begin{matrix}( UCHT - 1 ( x ) - neg\_Contr . ( x ) ) * \\ \frac{WT ( y ) - neg\_Contr . ( wt )}{UCHT - 1 ( wt ) - neg\_Contr . ( wt )}\end{matrix}}$$

[0671] In this equation value_Sample means the value in arbitrary units of binding depicting the degree of binding of a specific anti-CD3 antibody to a specific alanine-mutant as shown in FIG. 8 (A-D), Sample means the geometric mean fluorescence value obtained for a specific anti-CD3 antibody assayed on a specific alanine-scanning transfectant, neg Contr. means the geometric mean fluorescence value obtained for the negative control assayed on a specific alanine-mutant, UCHT-1 means the geometric mean fluorescence value obtained for the UCHT-1 antibody assayed on a specific alanine-mutant, WT means the geometric mean fluorescence value obtained for a specific anti-CD3 antibody assayed on the wild-type transfectant, x specifies the respective transfectant, y specifies the respective anti-CD3 antibody and wt specifies that the respective transfectant is the wild-type.

[0672] As can be seen in FIG. 8 (A-D) the IgG antibody A2J HLP showed a pronounced loss of binding for the amino acids asparagine at position 4, threonine at position 23 and isoleucine at position 25 of the mature CD3 epsilon chain. A complete loss of binding of IgG antibody A2J HLP was observed for the amino acids glutamine at position 1, aspartate at position 2, glycine at position 3 and glutamate at position 5 of the mature CD3 epsilon chain. IgG antibody E2M HLP showed a pronounced loss of binding for the amino acids asparagine at position 4, threonine at position 23 and isoleucine at position 25 of the mature CD3 epsilon chain. IgG antibody E2M HLP showed a complete loss of binding for the amino acids glutamine at position 1, aspartate at position 2, glycine at position 3 and glutamate at position 5 of the mature CD3 epsilon chain. IgG antibody H2C HLP showed an intermediate loss of binding for the amino acid asparagine at position 4 of the mature CD3 epsilon chain and it showed a complete loss of binding for the amino acids glutamine at position 1, aspartate at position 2, glycine at position 3 and glutamate at position 5 of the mature CD3 epsilon chain. Single chain antibody F12Q HLP showed an essentially complete loss of binding for the amino acids glutamine at position 1, aspartate at position 2, glycine at position 3 of the mature CD3 epsilon chain and glutamate at position 5 of the mature CD3 epsilon chain.

6. Binding Analysis of the Cross-Species Specific Anti-CD3 Binding Molecule H2C HLP to the Human CD3 Epsilon Chain with and without N-Terminal His6 Tag Transfected into the Murine T Cell Line EL4
6.1. Cloning and Expression of the Human CD3 Epsilon Chain with N-Terminal Six Histidine Tag (His6 Tag)

[0673] A cDNA fragment coding for the human CD3 epsilon chain with a N-terminal His6 tag was obtained by gene synthesis. The gene synthesis fragment was designed as to contain first a Kozak site for eukaryotic expression of the construct, which is followed in frame by the coding sequence of a 19 amino acid immunoglobulin leader peptide, which is followed in frame by the coding sequence of a His6 tag which is followed in frame by the coding sequence of the mature human CD3 epsilon chain (the cDNA and amino acid sequences of the construct are listed as SEQ ID NOs 256 and 255). The gene synthesis fragment was also designed as to contain restriction sites at the beginning and the end of the cDNA. The introduced restriction sites EcoRI at the 5′ end and SalI at the 3′ end, were used in the following cloning procedures. The gene synthesis fragment was then cloned via EcoRI and SalI into a plasmid designated pEF-NEO (as described above) following standard protocols. A sequence verified plasmid was used to transfect the murine T cell line EL4. Transfection and selection of the transfectants were performed as described above. After 34 days of cell culture the transfectants were used for the assay described below.

6.2. Binding of the Cross-Species Specific Anti-CD3 Binding Molecule H2C HLP to the Human CD3 Epsilon Chain with and without N-Terminal His6 Tag

[0674] A chimeric IgG antibody with the binding specificity H2C HLP specific for CD3 epsilon was tested for binding to human CD3 epsilon with and without N-terminal His6 tag. Binding of the antibody to the EL4 cell lines transfected the His6-human CD3 epsilon and wild-type human CD3 epsilon respectively was tested by an FACS assay according to standard protocols. 2.5×10⁵ cells of the transfectants were incubated with 50 μl of cell culture supernatant containing the chimeric IgG antibody or 50 μl of the respective control antibodies at 5 μg/ml in PBS with 2% FCS. As negative control an appropriate isotype control and as positive control for expression of the constructs the CD3 specific antibody UCHT-1 were used respectively. The binding of the antibodies was detected with a R-Phycoerythrin-conjugated affinity purified F(ab′)2 fragment, goat anti-mouse IgG, Fc-gamma fragment specific, diluted 1:100 in PBS with 2% FCS (Jackson ImmunoResearch Europe Ltd., Newmarket, Suffolk, UK).

[0675] Samples were measured on a FACSCalibur (BD biosciences, Heidelberg, Germany). Compared to the EL4 cell line transfected with wild-type human CD3 epsilon a clear loss of binding of the chimeric IgG with binding specificity H2C HLP to human-CD3 epsilon with an N-terminal His6 tag was detected. These results showed that a free N-terminus of CD3 epsilon is essential for binding of the cross-species specific anti-CD3 binding specificity H2C HLP to the human CD3 epsilon chain (FIG. 9).

### 7. Cloning and Expression of the C-Terminal, Transmembrane and Truncated Extracellular Domains of Human MCSP

[0676] The coding sequence of the C-terminal, transmembrane and truncated extracellular domain of human MCSP (amino acids 1538-2322) was obtained by gene synthesis according to standard protocols (cDNA sequence and amino acid sequence of the recombinant construct for expression of the C-terminal, transmembrane and truncated extracellular domain of human MCSP (designated as human D3) are listed under SEQ ID NOs 250 and 249). The gene synthesis fragment was designed as to contain first a Kozak site to allow eukaryotic expression of the construct followed by the coding sequence of an 19 amino acid immunoglobulin leader peptide followed in frame by a FLAG tag, followed in frame by a sequence containing several restriction sites for cloning purposes and coding for a 9 amino acid artificial linker (SRTRSGSQL), followed in frame by the coding sequence of the C-terminal, transmembrane and truncated extracellular domain of human MCSP and a stop codon. Restriction sites were introduced at the beginning and at the end of the DNA fragment. The restriction sites EcoRI at the 5′ end and SalI at the 3′ end were used in the following cloning procedures. The fragment was digested with EcoRI and SalI and cloned into pEF-DHFR (pEF-DHFR is described in Mack et al. Proc. Natl. Acad. Sci. USA 92 (1995) 7021-7025) following standard protocols. A sequence verified plasmid was used to transfect CHO/dhfr− cells (ATCC No. CRL 9096). Cells were cultivated in RPMI 1640 with stabilized glutamine, supplemented with 10% FCS, 1% penicillin/streptomycin (all obtained from Biochrom AG Berlin, Germany) and nucleosides from a stock solution of cell culture grade reagents (Sigma-Aldrich Chemie GmbH, Taufkirchen, Germany) to a final concentration of 10 μg/ml Adenosine, 10 μg/ml Deoxyadenosine and 10 μg/ml Thymidine, in an incubator at 37° C., 95% humidity and 7% CO₂. Transfection was performed using the PolyFect Transfection Reagent (Qiagen GmbH, Hilden, Germany) and 5 μg of plasmid DNA according to the manufacturer's protocol. After cultivation for 24 hours cells were washed once with PBS and cultivated again in RPMI 1640 with stabilized glutamine and 1% penicillin/streptomycin. Thus the cell culture medium did not contain nucleosides and thereby selection was applied on the transfected cells. Approximately 14 days after transfection the outgrowth of resistant cells was observed. After an additional 7 to 14 days the transfectants were tested for expression of the construct by FACS analysis. 2.5×10⁵ cells were incubated with 50 μl of an anti-Flag-M2 antibody (Sigma-Aldrich Chemie GmbH, Taufkirchen, Germany) diluted to 5 μg/ml in PBS with 2% FCS. The binding of the antibody was detected with a R-Phycoerythrin-conjugated affinity purified F(ab′)2 fragment, goat anti-mouse IgG, Fc-gamma fragment specific diluted 1:100 in PBS with 2% FCS (ImmunoResearch Europe Ltd., Newmarket, Suffolk, UK). The samples were measured on a FACScalibur (BD biosciences, Heidelberg, Germany).

### 8. Cloning and Expression of the C-Terminal, Transmembrane and Truncated Extracellular Domains of Macaque MCSP

[0677] The cDNA sequence of the C-terminal, transmembrane and truncated extracellular domains of macaque MCSP (designated as macaque D3) was obtained by a set of three PCRs on macaque skin cDNA (Cat No. C1534218-Cy-BC; BioCat GmbH, Heidelberg, Germany) using the following reaction conditions: 1 cycle at 94° C., 3 min., 40 cycles with 94° C. for 0.5 min., 52° C. for 0.5 min. and 72° C. for 1.75 min., terminal cycle of 72° C. for 3 min. The following primers were used:

forward primer:
(SEQ ID No. 361)
5′-GATCTGGTCTACACCATCGAGC-3′
reverse primer:
(SEQ ID No. 362)
5′-GGAGCTGCTGCTGGCTCAGTGAGG-3′
forward primer:
(SEQ ID No. 363)
5′-TTCCAGCTGAGCATGTCTGATGG-3′
reverse primer:
(SEQ ID No. 364)
5′-CGATCAGCATCTGGGCCCAGG-3′
forward primer:
(SEQ ID No. 365)
5′-GTGGAGCAGTTCACTCAGCAGGACC-3′
reverse primer:
(SEQ ID No. 366)
5′-GCCTTCACACCCAGTACTGGCC-3′

[0678] Those PCRs generated three overlapping fragments (A: 1-1329, B: 1229-2428, C: 1782-2547) which were isolated and sequenced according to standard protocols using the PCR primers and thereby provided a 2547 bp portion of the cDNA sequence of macaque MCSP (the cDNA sequence and amino acid sequence of this portion of macaque MCSP are listed under SEQ ID NOs 252 and 251) from 74 bp upstream of the coding sequence of the C-terminal domain to 121 bp downstream of the stop codon. Another PCR using the following reaction conditions: 1 cycle at 94° C. for 3 min, 10 cycles with 94° C. for 1 min, 52° C. for 1 min and 72° C. for 2.5 min, terminal cycle of 72° C. for 3 min was used to fuse the PCR products of the aforementioned reactions A and B. The following primers are used:

forward primer:
(SEQ ID No. 367)
5′-tcccgtacgagatctggatcccaattggatggcggactcgtg
ctgttctcacacagagg-3′
reverse primer:
(SEQ ID No. 368)
5′-agtgggtcgactcacacccagtactggccattcttaagggca
ggg-3′

[0679] The primers for this PCR were designed to introduce restriction sites at the beginning and at the end of the cDNA fragment coding for the C-terminal, transmembrane and truncated extracellular domains of macaque MCSP. The introduced restriction sites MfeI at the 5′ end and SalI at the 3′ end, were used in the following cloning procedures. The PCR fragment was then cloned via MfeI and SalI into a Bluescript plasmid containing the EcoRI/MfeI fragment of the aforementioned plasmid pEF-DHFR (pEF-DHFR is described in Raum et al. Cancer Immunol Immunother 50 (2001) 141-150) by replacing the C-terminal, transmembrane and truncated extracellular domains of human MCSP. The gene synthesis fragment contained the coding sequences of the immunoglobulin leader peptide and the Flag tag as well as the artificial linker (SRTRSGSQL) in frame to the 5′ end of the cDNA fragment coding for the C-terminal, transmembrane and truncated extracellular domains of macaque MCSP. This vector was used to transfect CHO/dhfr− cells (ATCC No. CRL 9096). Cells were cultivated in RPMI 1640 with stabilized glutamine supplemented with 10% FCS, 1% penicillin/streptomycin (all from Biochrom AG Berlin, Germany) and nucleosides from a stock solution of cell culture grade reagents (Sigma-Aldrich Chemie GmbH, Taufkirchen, Germany) to a final concentration of 10 μg/ml Adenosine, 10 μg/ml Deoxyadenosine and 10 μg/ml Thymidine, in an incubator at 37° C., 95% humidity and 7% CO2. Transfection was performed with PolyFect Transfection Reagent (Qiagen GmbH, Hilden, Germany) and 5 μg of plasmid DNA according to the manufacturer's protocol. After cultivation for 24 hours cells were washed once with PBS and cultivated again in RPMI 1640 with stabilized glutamine and 1% penicillin/streptomycin. Thus the cell culture medium did not contain nucleosides and thereby selection was applied on the transfected cells. Approximately 14 days after transfection the outgrowth of resistant cells is observed. After an additional 7 to 14 days the transfectants were tested for expression of the recombinant construct via FAGS. 2.5×10⁵ cells were incubated with 50 μl of an anti-Flag-M2 antibody (Sigma-Aldrich Chemie GmbH, Taufkirchen, Germany) diluted to 5 μg/ml in PBS with 2% FCS. Bound antibody was detected with a R-Phycoerythrin-conjugated affinity purified F(ab′)2 fragment, goat anti-mouse IgG, Fc-gamma fragment specific, diluted 1:100 in PBS with 2% FCS (Jackson ImmunoResearch Europe Ltd., Newmarket, Suffolk, UK). Samples were measured on a FACScalibur (BD biosciences, Heidelberg, Germany).

### 9. Generation and Characterisation of MCSP and CD3 Cross-Species Specific Bispecific Single Chain Molecules

[0680] Bispecific single chain antibody molecules each comprising a binding domain cross-species specific for human and non-chimpanzee primate CD3 epsilon as well as a binding domain cross-species-specific for human and non-chimpanzee primate MCSP, are designed as set out in the following Table 1:

TABLE 1
Formats of MCSP and CD3 cross-species
specific bispecific single chain antibodies

| SEQ ID | Formats of protein constructs |
|---|---|
| (nucl/prot) | (N → C) |
| 190/189 | MCSP-G4 HL × H2C HL |
| 192/191 | MCSP-G4 HL × F12Q HL |
| 194/193 | MCSP-G4 HL × I2C HL |
| 196/195 | MCSP-G4 HLP × F6A HLP |
| 198/197 | MCSP-G4 HLP × H2C HLP |
| 202/201 | MCSP-G4 HLP × G4H HLP |
| 206/205 | MCSP-G4 HLP × E1L HLP |
| 208/207 | MCSP-G4 HLP × E2M HLP |
| 212/211 | MCSP-G4 HLP × F12Q HL |
| 214/213 | MCSP-G4 HLP × I2C HL |
| 216/215 | MCSP-D2 HL × H2C HL |
| 218/217 | MCSP-D2 HL × F12Q HL |
| 220/219 | MCSP-D2 HL × I2C HL |
| 222/221 | MCSP-D2 HLP × H2C HLP |
| 224/223 | MCSP-F9 HL × H2C HL |
| 226/225 | MCSP-F9 HLP × H2C HLP |
| 228/227 | MCSP-F9 HLP × G4H HLP |
| 318/317 | MCSP-A9 HL × H2C HL |
| 320/319 | MCSP-A9 HL × F12Q HL |
| 322/321 | MCSP-A9 HL × I2C HL |
| 324/323 | MCSP-C8 HL × I2C HL |
| 328/327 | MCSP-B7 HL × I2C HL |
| 326/325 | MCSP-B8 HL × I2C HL |
| 330/329 | MCSP-G8 HL × I2C HL |
| 332/331 | MCSP-D5 HL × I2C HL |
| 334/333 | MCSP-F7 HL × I2C HL |
| 336/335 | MCSP-G5 HL × I2C HL |
| 338/337 | MCSP-F8 HL × I2C HL |
| 340/339 | MCSP-G10 HL × I2C HL |

[0681] The aforementioned constructs containing the variable heavy-chain (VH) and variable light-chain (VL) domains cross-species specific for human and macaque MCSP D3 and the VH and VL domains cross-species specific for human and macaque CD3 were obtained by gene synthesis. The gene synthesis fragments were designed as to contain first a Kozak site for eukaryotic expression of the construct, followed by a 19 amino acid immunoglobulin leader peptide, followed in frame by the coding sequence of the respective bispecific single chain antibody molecule, followed in frame by the coding sequence of a histidine₆-tag and a stop codon. The gene synthesis fragment was also designed as to introduce suitable N- and C-terminal restriction sites. The gene synthesis fragment was cloned via these restriction sites into a plasmid designated pEF-DHFR (pEF-DHFR is described in Raum et al. Cancer Immunol Immunother 50 (2001) 141-150) according to standard protocols (Sambrook, Molecular Cloning; A Laboratory Manual, 3rd edition, Cold Spring Harbour Laboratory Press, Cold Spring Harbour, New York (2001)). The constructs were transfected stably or transiently into DHFR-deficient CHO-cells (ATCC No. CRL 9096) by electroporation or alternatively into HEK 293 (human embryonal kidney cells, ATCC Number: CRL-1573) in a transient manner according to standard protocols.

[0682] Eukaryotic protein expression in DHFR deficient CHO cells was performed as described by Kaufmann R. J. (1990) Methods Enzymol. 185, 537-566. Gene amplification of the constructs was induced by addition of increasing concentrations of methothrexate (MTX) up to final concentrations of 20 nM MTX. After two passages of stationary culture the cells were grown in roller bottles with nucleoside-free HyQ PF CHO liquid soy medium (with 4.0 mM L-Glutamine with 0.1% Pluronic F-68; HyClone) for 7 days before harvest. The cells were removed by centrifugation and the supernatant containing the expressed protein is stored at −20° C.

[0683] Äkta® Explorer System (GE Health Systems) and Unicorn® Software were used for chromatography. Immobilized metal affinity chromatography (“IMAC”) was performed using a Fractogel EMD Chelate® (Merck) which was loaded with ZnCl₂ according to the protocol provided by the manufacturer. The column was equilibrated with buffer A (20 mM sodium phosphate buffer pH 7.2, 0.1 M NaCl) and the cell culture supernatant (500 ml) was applied to the column (10 ml) at a flow rate of 3 ml/min. The column was washed with buffer A to remove unbound sample. Bound protein was eluted using a two step gradient of buffer B (20 mM sodium phosphate buffer pH 7.2, 0.1 M NaCl, 0.5 M Imidazole) according to the following:

Step 1: 20% buffer B in 6 column volumes
Step 2: 100% buffer B in 6 column volumes

[0684] Eluted protein fractions from step 2 were pooled for further purification. All chemicals are of research grade and purchased from Sigma (Deisenhofen) or Merck (Darmstadt).

[0685] Gel filtration chromatography was performed on a HiLoad 16/60 Superdex 200 prep grade column (GE/Amersham) equilibrated with Equi-buffer (25 mM Citrate, 200 mM Lysine, 5% Glycerol, pH 7.2). Eluted protein samples (flow rate 1 ml/min) were subjected to standard SDS-PAGE and Western Blot for detection. Prior to purification, the column was calibrated for molecular weight determination (molecular weight marker kit, Sigma MW GF-200). Protein concentrations were determined using OD280 nm.

[0686] Purified bispecific single chain antibody protein was analyzed in SDS PAGE under reducing conditions performed with pre-cast 4-12% Bis Tris gels (Invitrogen). Sample preparation and application were performed according to the protocol provided by the manufacturer. The molecular weight was determined with MultiMark protein standard (Invitrogen). The gel was stained with colloidal Coomassie (Invitrogen protocol). The purity of the isolated protein is >95% as determined by SDS-PAGE.

[0687] The bispecific single chain antibody has a molecular weight of about 52 kDa under native conditions as determined by gel filtration in phosphate buffered saline (PBS). All constructs were purified according to this method.

[0688] Western Blot was performed using an Optitran® BA-S83 membrane and the Invitrogen Blot Module according to the protocol provided by the manufacturer. For detection of the bispecific single chain antibody protein antibodies an anti-His Tag antibody was used (Penta His, Qiagen). A Goat-anti-mouse Ig antibody labeled with alkaline phosphatase (AP) (Sigma) was used as secondary antibody and BCIP/NBT (Sigma) as substrate. A single band was detected at 52 kD corresponding to the purified bispecific single chain antibody.

[0689] Alternatively, constructs were transiently expressed in DHFR deficient CHO cells. In brief, 4×105 cells per construct were cultivated in 3 ml RPMI 1640 all medium with stabilized glutamine supplemented with 10% fetal calf serum, 1% penicillin/streptomycin and nucleosides from a stock solution of cell culture grade reagents (Sigma-Aldrich Chemie GmbH, Taufkirchen, Germany) to a final concentration of 10 μg/ml Adenosine, 10 μg/ml Deoxyadenosine and 10 μg/ml Thymidine, in an incubator at 37° C., 95% humidity and 7% CO2 one day before transfection. Transfection was performed with Fugene 6 Transfection Reagent (Roche, #11815091001) according to the manufacturer's protocol. 94 μl OptiMEM medium (Invitrogen) and 6 μl Fugene 6 are mixed and incubated for 5 minutes at room temperature. Subsequently, 1.5 μg DNA per construct were added, mixed and incubated for 15 minutes at room temperature. Meanwhile, the DHFR deficient CHO cells were washed with 1×PBS and resuspended in 1.5 ml RPMI 1640 all medium. The transfection mix was diluted with 600 μl RPMI 1640 all medium, added to the cells and incubated overnight at 37° C., 95% humidity and 7% CO2. The day after transfection the incubation volume of each approach was extended to 5 ml RPMI 1640 all medium. Supernatant was harvested after 3 days of incubation.

### 10. Flow Cytometric Binding Analysis of the MCSP and CD3 Cross-Species Specific Bispecific Antibodies

[0690] In order to test the functionality of the cross-species specific bispecific antibody constructs regarding the capability to bind to human and macaque MCSP D3 and CD3, respectively, a FACS analysis was performed. For this purpose CHO cells transfected with human MCSP D3 (as described in Example 7) and the human CD3 positive T cell leukemia cell line HPB-ALL (DSMZ, Braunschweig, ACC483) were used to test the binding to human antigens. The binding reactivity to macaque antigens was tested by using the generated macaque MCSP D3 transfectant (described in Example 8) and a macaque T cell line 4119LnPx (kindly provided by Prof. Fickenscher, Hygiene Institute, Virology, Erlangen-Nuernberg; published in Knappe A, et al., and Fickenscher H., Blood 2000, 95, 3256-61). 200.000 cells of the respective cell lines were incubated for 30 min on ice with 50 μl of the purified protein of the cross-species specific bispecific antibody constructs (2 μg/ml) or cell culture supernatant of transfected cells expressing the cross-species specific bispecific antibody constructs. The cells were washed twice in PBS with 2% FCS and binding of the construct was detected with a murine anti-His antibody (Penta His antibody; Qiagen; diluted 1:20 in 50 μl PBS with 2% FCS). After washing, bound anti-His antibodies were detected with an Fc gamma-specific antibody (Dianova) conjugated to phycoerythrin, diluted 1:100 in PBS with 2% FCS. Supernatant of untransfected CHO cells was used as negative control for binding to the T cell lines. A single chain construct with irrelevant target specificity was used as negative control for binding to the MCSP-D3 transfected CHO cells.

[0691] Flow cytometry was performed on a FACS-Calibur apparatus; the CellQuest software was used to acquire and analyze the data (Becton Dickinson biosciences, Heidelberg). FACS staining and measuring of the fluorescence intensity were performed as described in Current Protocols in Immunology (Coligan, Kruisbeek, Margulies, Shevach and Strober, Wiley-Interscience, 2002).

[0692] The bispecific binding of the single chain molecules listed above, which are cross-species specific for MCSP D3 and cross-species specific for human and macaque CD3 was clearly detectable as shown in FIGS. 10, 11, 12 and 39. In the FACS analysis all constructs showed binding to CD3 and MCSP D3 as compared to the respective negative controls. Cross-species specificity of the bispecific antibodies to human and macaque CD3 and MCSP D3 antigens was demonstrated.

### 11. Bioactivity of MCSP and CD3 Cross-Species Specific Bispecific Single Chain Antibodies

[0693] Bioactivity of the generated bispecific single chain antibodies was analyzed by chromium 51 (⁵¹Cr) release in vitro cytotoxicity assays using the MCSP D3 positive cell lines described in Examples 7 and 8. As effector cells stimulated human CD4/CD56 depleted PBMC, stimulated human PBMC or the macaque T cell line 4119LnPx are used as specified in the respective figures.

[0694] Generation of the stimulated CD4/CD56 depleted PBMC was performed as follows: Coating of a Petri dish (145 mm diameter, Greiner bio-one GmbH, Kremsmünster) was carried out with a commercially available anti-CD3 specific antibody (e.g. OKT3, Othoclone) in a final concentration of 1 μg/ml for 1 hour at 37° C. Unbound protein was removed by one washing step with PBS. The fresh PBMC were isolated from peripheral blood (30-50 ml human blood) by Ficoll gradient centrifugation according to standard protocols. 3-5×10⁷ PBMC were added to the precoated petri dish in 120 ml of RPMI 1640 with stabilized glutamine/10% FCS/IL-2 20 U/ml (Proleukin, Chiron) and stimulated for 2 days. On the third day the cells were collected and washed once with RPMI 1640. IL-2 was added to a final concentration of 20 U/ml and the cells were cultivated again for one day in the same cell culture medium as above. By depletion of CD4+ T cells and CD56+ NK cells according to standard protocols CD8+ cytotoxic T lymphocytes (CTLs) were enriched.

[0695] Target cells were washed twice with PBS and labelled with 11.1 MBq ⁵¹Cr in a final volume of 100 μl RPMI with 50% FCS for 45 minutes at 37° C. Subsequently the labelled target cells were washed 3 times with 5 ml RPMI and then used in the cytotoxicity assay. The assay was performed in a 96 well plate in a total volume of 250 μl supplemented RPMI (as above) with an E:T ratio 10:1. 1 μg/ml of the cross-species specific bispecific single chain antibody molecules and 20 threefold dilutions thereof were applied. If using supernatant containing the cross-species specific bispecific single chain antibody molecules, 21 two- and 20 threefold dilutions thereof were applied for the macaque and the human cytotoxicity assay, respectively. The assay time was 18 hours and cytotoxicity was measured as relative values of released chromium in the supernatant related to the difference of maximum lysis (addition of Triton-X) and spontaneous lysis (without effector cells). All measurements were done in quadruplicates. Measurement of chromium activity in the supernatants was performed with a Wizard 3″ gamma counter (Perkin Elmer Life Sciences GmbH, Köln, Germany). Analysis of the experimental data was performed with Prism 4 for Windows (version 4.02, GraphPad Software Inc., San Diego, Calif., USA). Sigmoidal dose response curves typically have R² values>0.90 as determined by the software. EC₅₀ values calculated by the analysis program were used for comparison of bioactivity.

[0696] As shown in FIGS. 13 to 17 and 40, all of the generated cross-species specific bispecific single chain antibody constructs demonstrate cytotoxic activity against human MCSP D3 positive target cells elicited by stimulated human CD4/CD56 depleted PBMC or stimulated PBMC and against macaque MCSP D3 positive target cells elicited by the macaque T cell line 4119LnPx.

### 12. Plasma Stability of MCSP and CD3 Cross-Species Specific Bispecific Single Chain Antibodies

[0697] Stability of the generated bispecific single chain antibodies in human plasma was analyzed by incubation of the bispecific single chain antibodies in 50% human Plasma at 37° C. and 4° C. for 24 hours and subsequent testing of bioactivity. Bioactivity was studied in a chromium 51 (⁵¹Cr) release in vitro cytotoxicity assay using a MCSP positive CHO cell line (expressing MCSP as cloned according to example 14 or 15) as target and stimulated human CD8 positive T cells as effector cells.

[0698] EC₅₀ values calculated by the analysis program as described above were used for comparison of bioactivity of bispecific single chain antibodies incubated with 50% human plasma for 24 hours at 37° C. and 4° C. respectively with bispecific single chain antibodies without addition of plasma or mixed with the same amount of plasma immediately prior to the assay.

[0699] As shown in FIG. 18 and Table 2 the bioactivity of the G4 H-L×I2C H-L, G4 H-L x H2C H-L and G4 H-L×F12Q H-L bispecific antibodies was not significantly reduced as compared with the controls without the addition of plasma or with addition of plasma immediately before testing of bioactivity.

TABLE 2
bioactivity of the bispecific antibodies without
or with the addition of Plasma

| | Without | With | Plasma | Plasma |
|---|---|---|---|---|
| Construct | plasma | plasma | 37° C. | 4° C. |
| G4 H-L x | 300 | 796 | 902 | 867 |
| I2C H-L | | | | |
| G4 H-L x | 496 | 575 | 2363 | 1449 |
| H2C H-L | | | | |
| G4 H-L x | 493 | 358 | 1521 | 1040 |
| F12Q H-L | | | | |

13. Redistribution of Circulating T Cells in the Absence of Circulating Target Cells by First Exposure to CD3 Binding Molecules Directed at Conventional i.e. Context Dependent CD3 Epitopes is a Major Risk Factor for Adverse Events Related to the Initiation of Treatment
T Cell Redistribution in Patients with B-Cell Non-Hodgkin-Lymphoma (B-NHL) Following Initiation of Treatment with the Conventional CD3 Binding Molecule

[0700] A conventional CD19×CD3 binding molecules is a CD3 binding molecule of the bispecific tandem scFv format (Loffler (2000, Blood, Volume 95, Number 6) or WO 99/54440). It consists of two different binding portions directed at (i) CD19 on the surface of normal and malignant human B cells and (ii) CD3 on human T cells. By crosslinking CD3 on T cells with CD19 on B cells, this construct triggers the redirected lysis of normal and malignant B cells by the cytotoxic activity of T cells.

[0701] The CD3 epitope recognized by such a conventional CD3 binding molecule is localized on the CD3 epsilon chain, where it only takes the correct conformation if it is embedded within the rest of the epsilon chain and held in the right position by heterodimerization of the epsilon chain with either the CD3 gamma or delta chain. Interaction of this highly context dependent epitope with a conventional CD3 binding molecule (see e.g. Loffler (2000, Blood, Volume 95, Number 6) or WO 99/54440)—even when it occurs in a purely monovalent fashion and without any crosslinking—can induce an allosteric change in the conformation of CD3 leading to the exposure of an otherwise hidden proline-rich region within the cytoplasmic domain of CD3 epsilon. Once exposed, the proline-rich region can recruit the signal transduction molecule Nck2, which is capable of triggering further intracellular signals. Although this is not sufficient for full T cell activation, which definitely requires crosslinking of several CD3 molecules on the T cell surface, e.g. by crosslinking of several anti-CD3 molecules bound to several CD3 molecules on a T cell by several CD19 molecules on the surface of a B cell, pure monovalent interaction of conventional CD3 binding molecules to their context dependent epitope on CD3 epsilon is still not inert for T cells in terms of signalling. Without being bound by theory, monovalent conventional CD3 binding molecules (known in the art) may induce some T cell reactions when infused into humans even in those cases where no circulating target cells are available for CD3 crosslinking. An important T cell reaction to the intravenous infusion of monovalent conventional CD19×CD3 binding molecule into B-NHL patients who have essentially no circulating CD19-positive B cells is the redistribution of T cells after start of treatment. It has been found in a phase I clinical trial that this T cell reaction occurs during the starting phase of intravenous CD19×CD3 binding molecule infusion in all individuals without circulating CD19-positive target B cells essentially independent of the CD19×CD3 binding molecule dose (FIG. 19). However, sudden increases in CD19×CD3 binding molecule exposure have been found to trigger virtually the same redistributional T cell reaction in these patients as the initial exposure of T cells to CD19×CD3 binding molecule at treatment start (FIG. 20 A) and even gradual increases in CD19×CD3 binding molecule exposure still can have redistributional effects on circulating T cells (FIG. 21). Moreover, it has been found that this essentially dose-independent redistributional T cell reaction in the absence of circulating target cells as triggered by conventional CD3 binding molecules like the CD19×CD3 binding molecule (e.g. disclosed in WO 99/54440) in 100% of all treated individuals is a major risk factor for adverse events related to the initiation of treatment.

[0702] According to the study protocol, patients with relapsed histologically confirmed indolent B-cell Non-Hodgkin-Lymphoma (B-NHL) including mantle cell lymphoma were recruited in an open-label, multi-center phase I interpatient dose-escalation trial. The study protocol was approved by the independent ethics committees of all participating centers and sent for notification to the responsible regulatory authority. Measurable disease (at least one lesion 1.5 cm) as documented by CT scan was required for inclusion into the study. Patients received conventional CD19×CD3 binding molecule by continuous intravenous infusion with a portable minipump system over four weeks at constant flow rate (i.e. dose level). Patients were hospitalized during the first two weeks of treatment before they were released from the hospital and continued treatment at home. Patients without evidence of disease progression after four weeks were offered to continue treatment for further four weeks. So far six different dose levels were tested without reaching a maximum tolerated dose (MTD): 0.5, 1.5, 5, 15, 30 and 60 μg/m²/24 h. Cohorts consisted of three patients each if no adverse events defined by the study protocol as DLT (dose limiting toxicity) were observed. In case of one DLT among the first three patients the cohort was expanded to six patients, which—in the absence of a second DLT—allowed further dose escalation. Accordingly, dose levels without DLT in cohorts with 3 patients or with one DLT in cohorts with 6 patients were regarded as safe. Study treatment was stopped in all patients who developed a DLT. At 15 and 30 μg/m²/24 h different modes of treatment initiation during the first 24 h were tested in several additional cohorts: (i) Stepwise increase after 5 μg/m²/24 h for the first 24 h to 15 μg/m²/24 h maintenance dose (patient cohort 15-step), (ii) even continuous increase of flow-rate from almost zero to 15 or 30 μg/m²/24 h (patient cohorts 15-ramp and 30-ramp) and (iii) start with the maintenance dose from the very beginning (patient cohorts 15-flat, 30-flat and 60-flat). Patient cohorts at dose levels 0.5, 1.5 and 5 μg/m²/24 h were all started with the maintenance dose from the very beginning (i.e. flat initiation).

[0703] Time courses of absolute B- and T-cell counts in peripheral blood were determined by four color FACS analysis as follows:

### Collection of Blood Samples and Routine Analysis

[0704] In patient cohorts 15-ramp, 15-flat, 30-ramp, 30-flat and 60-flat blood samples (6 ml) were obtained before and 0.75, 2, 6, 12, 24, 30, 48 hours after start of CD19×CD3 binding molecule (as disclosed in WO 99/54440) infusion as well as on treatment days 8, 15, 17, 22, 24, 29, 36, 43, 50, 57 and 4 weeks after end of conventional CD19×CD3 binding molecule infusion using EDTA-containing Vacutainer™ tubes (Becton Dickinson) which were shipped for analysis at 4° C. In patient cohorts 15-step blood samples (6 ml) were obtained before and 6, 24, 30, 48 hours after start of CD19×CD3 binding molecule infusion as well as on treatment days 8, 15, 22, 29, 36, 43, 50, 57 and 4 weeks after end of CD19×CD3 binding molecule infusion. At dose levels 0.5, 1.5 and 5 μg/m²/24 h blood samples (6 ml) were obtained before and 6, 24, 48 hours after start of CD19×CD3 binding molecule infusion as well as on treatment days 8, 15, 22, 29, 36, 43, 50, 57 and 4 weeks after end of CD19×CD3 binding molecule infusion. In some cases slight variations of these time points occurred for operational reasons. FACS analysis of lymphocyte subpopulations was performed within 24-48 h after blood sample collection. Absolute numbers of leukocyte subpopulations in the blood samples were determined through differential blood analysis on a CoulterCounter™ (Coulter).

Isolation of PBMC from Blood Samples

[0705] PBMC (peripheral blood mononuclear cells) isolation was performed by an adapted Ficoll™ gradient separation protocol. Blood was transferred at room temperature into 10 ml Leucosep™ tubes (Greiner) pre-loaded with 3 ml Biocoll™ solution (Biochrom). Centrifugation was carried out in a swing-out rotor for 15 min at 1700×g and 22° C. without deceleration. The PBMC above the Biocoll™ layer were isolated, washed once with FACS buffer (PBS/2% FBS [Foetal Bovine Serum; Biochrom]), centrifuged and resuspended in FACS buffer. Centrifugation during all wash steps was carried out in a swing-out rotor for 4 min at 800×g and 4° C. If necessary, lysis of erythrocytes was performed by incubating the isolated PBMC in 3 ml erythrocyte lysis buffer (8.29 g NH₄Cl, 1.00 g KHCO₃, 0.037 g EDTA, ad 1.0 l H₂O_{bidest}, pH 7.5) for 5 min at room temperature followed by a washing step with FACS buffer.

Staining of PBMC with Fluorescence-Labeled Antibodies Against Cell Surface Molecules

[0706] Monoclonal antibodies were obtained from Invitrogen (¹Cat. No. MHCD1301, ²Cat. No. MHCD1401), Dako (⁵Cat. No. C7224) or Becton Dickinson (³Cat. No. 555516, ⁴Cat. No. 345766) used according to the manufacturers' recommendations. 5×10⁵-1×10⁶ cells were stained with the following antibody combination: anti-CD13¹/anti-CD14² (FITC)×anti-CD56³ (PE)×anti-CD3⁴ (PerCP)×anti-CD19⁵ (APC). Cells were pelleted in V-shaped 96 well multititer plates (Greiner) and the supernatant was removed. Cell pellets were resuspended in a total volume of 100 μl containing the specific antibodies diluted in FACS buffer. Incubation was carried out in the dark for 30 min at 4° C. Subsequently, samples were washed twice with FACS buffer and cell pellets were resuspended in FACS buffer for flowcytometric analysis.

### Flowcytometric Detection of Stained Lymphocytes by FACS

[0707] Data collection was performed with a 4 color BD FACSCalibur™ (Becton Dickinson). For each measurement 1×10⁴ cells of defined lymphocyte subpopulations were acquired. Statistical analysis was performed with the program CellQuest Pro™ (Becton Dickinson) to obtain lymphocyte subpopulation percentages and to classify cell surface molecule expression intensity. Subsequently, percentages of single lymphocyte subsets related to total lymphocytes (i.e. B plus T plus NK cells excluding any myeloid cells via CD13/14-staining) as determined by FACS were correlated with the lymphocyte count from the differential blood analysis to calculate absolute cell numbers of T cells (CD3⁺, CD56⁻, CD13/14⁻) and B cells (CD19⁺, CD13/14⁻).

[0708] T cell redistribution during the starting phase of conventional CD19×CD3 binding molecule (e.g. disclosed in WO 99/54440) treatment in all those patients who had essentially no circulating CD19-positive B cells at treatment start is shown in (FIG. 19). For comparison, a representative example of T cell redistribution during the starting phase of CD19×CD3 binding molecule treatment in a patient with a significant number of circulating CD19-positive B cells is shown in FIG. 22.

[0709] In both cases (i.e. essentially no or many circulating B cells) circulating T cell counts rapidly decrease upon treatment start. However, in the absence of circulating B cells T cells tend to return into the circulating blood very early, while the return of T cells into the circulating blood of those patients who have a significant number of circulating B cells at treatment start is usually delayed until these circulating B cells are depleted. Thus, the T cell redistribution patterns mainly differ in the kinetics of T cell reappearance in the circulating blood.

[0710] Assessment of efficacy based on CT scan was carried out by central reference radiology after 4 weeks of treatment and in patients receiving additional 4 weeks also after 8 weeks of treatment plus in all cases four weeks after end of treatment. Disappearance and/or normalization in size of all known lesions (including an enlarged spleen) plus clearance of bone marrow from lymphoma cells in cases of bone marrow infiltration was counted as complete response (CR). Reduction by at least 50% from baseline of the sum of products of the two biggest diameters (SPD) of each predefined target lesion was defined as partial response (PR); a reduction by at least 25% was regarded a minimal response (MR). Progressive disease (PD) was defined as ≥50% increase of SPD from baseline. SPD deviations from baseline between +50% and −25% were regarded as stable disease (SD).

[0711] Patient demographics, doses received and clinical outcome in 34 patients are summarized in Table 3. Clinical anti-tumor activity of the CD19×CD3 binding molecule was clearly dose dependent: Consistent depletion of circulating CD19-positive B (lymphoma) cell from peripheral blood was observed from 5 μg/m²/24 h onwards. At 15 μg/m²/24 h and 30 μg/m²/24 h first objective clinical responses (PRs and CRs) were recorded as well as cases of partial and complete elimination of B lymphoma cells from infiltrated bone marrow. Finally, at 60 μg/m²/24 h the response rate increased to 100% (PRs and CRs) and bone marrow clearance from B lymphoma cells was complete in all evaluable cases.

[0712] The CD19×CD3 binding molecule was well tolerated by the majority of patients. Most frequent adverse events of grades 1-4 in 34 patients, regardless of causality are summarized in Table 4. CD19×CD3 binding molecule-related adverse events usually were transient and fully reversible. In particular, there were 2 patients (patients #19 and #24 in Table 3) essentially without circulating CD19-positive B cells whose treatment was stopped early because of CNS adverse events (lead symptoms: confusion and disorientation) related to repeated T cell redistribution during the starting phase of CD19×CD3 binding molecule infusion.

[0713] One of these patients (#19) was in cohort 15-step. He received 5 μg/m²/24 h CD19×CD3 binding molecule for the first 24 h followed by sudden increase to 15 μg/m²/24 h maintenance dose. The corresponding T cell redistribution pattern shows that circulating T cell counts rapidly decreased upon start of infusion at 5 μg/m²/24 h followed by early reappearance of T cells in the circulating blood essentially without circulating CD19-positive B cells. As a consequence, the peripheral T cell counts had fully recovered when the CD19×CD3 binding molecule dose was increased after 24 h from 5 to 15 μg/m²/24 h. Therefore the dose step could trigger a second episode of T cell redistribution as shown in FIG. 20 A. This repeated T cell redistribution was related with CNS side effects (lead symptoms: confusion and disorientation) in this patient, which led to the stop of infusion. The relationship between repeated T cell redistribution and such CNS adverse events was also observed in previous phase I clinical trials in B-NHL patients who received CD19×CD3 binding molecule (e.g. disclosed in WO 99/54440) as repeated bolus infusion for 2 to 4 hours each usually followed by 2 days of treatment free interval (FIG. 20 B). Every single bolus infusion triggered one episode of T cell redistribution consisting of a fast decrease in circulating T cell counts and T cell recovery prior to the next bolus infusion. In total, CNS adverse events related to repeated T cell redistribution were observed in 5 out of 21 patients. FIG. 20 B shows the representative example of one patient from the bolus infusion trials, who developed CNS symptoms after the third episode of T cell redistribution. Typically, patients with CNS adverse events in the bolus infusion trials also had low circulating B cell counts.

[0714] The second patient (#24) from the continuous infusion trial, whose treatment was stopped early because of CNS adverse events (lead symptoms: confusion and disorientation) related to repeated T cell redistribution during the starting phase of CD19×CD3 binding molecule infusion, was in cohort 15-flat. By mistake, this patient received an CD19×CD3 binding molecule infusion without additional HSA as required for stabilization of the drug. The resulting uneven drug flow triggered repeated episodes of T cell redistribution instead of only one (FIG. 23 A) with the consequence that the infusion had to be stopped because of developing CNS symptoms. Yet, when the same patient was restarted correctly with CD19×CD3 binding molecule solution containing additional HSA for drug stabilization (e.g. disclosed in WO 99/54440), no repeated T cell redistribution was observed and the patient did not again develop any CNS symptoms (FIG. 23 B). Because this patient also had essentially no circulating B cells, the circulating T cells could react with fast redistribution kinetics even to subtle changes in drug exposure as observed. The CNS adverse events related to T cell redistribution in patients who have essentially no circulating target cells can be explained by a transient increase of T cell adhesiveness to the endothelial cells followed by massive simultaneous adhesion of circulating T cells to the blood vessel walls with a consecutive drop of T cell numbers in the circulating blood as observed. The massive simultaneous attachment of T cells to the blood vessel walls can cause an increase in endothelial permeability and endothelial cell activation. The consequences of increased endothelial permeability are fluid shifts from the intravascular compartment into interstitial tissue compartments including the CNS interstitium. Endothelial cell activation by attached T cells can have procoagulatory effects (Monaco et al. J Leukoc Biol 71 (2002) 659-668) with possible disturbances in blood flow (including cerebral blood flow) particularly with regard to capillary microcirculation. Thus, CNS adverse events related to T cell redistribution in patients essentially without circulating target cells can be the consequence of capillary leak and/or disturbances in capillary microcirculation through adherence of T cells to endothelial cells. The endothelial stress caused by one episode of T cell redistribution is tolerated by the majority of patients, while the enhanced endothelial stress caused by repeated T cell redistribution frequently causes CNS adverse events. More than one episode of T cell redistribution may be less risky only in patients who have low baseline counts of circulating T cells. However, also the limited endothelial stress caused by one episode of T cell redistribution can cause CNS adverse events in rare cases of increased susceptibility for such events as observed in 1 out of 21 patients in the bolus infusion trials with the CD19×CD3 binding molecule.

[0715] Without being bound by theory, the transient increase of T cell adhesiveness to the endothelial cells in patients who have essentially no circulating target cells can be explained as T cell reaction to the monovalent interaction of a conventional CD3 binding molecule, like the CD19×CD3 binding molecule (e.g. WO 99/54440), to its context dependent epitope on CD3 epsilon resulting in an allosteric change in the conformation of CD3 followed by the recruitment of Nck2 to the cytoplasmic domain of CD3 epsilon as described above. As Nck2 is directly linked to integrins via PINCH and ILK (FIG. 28), recruitment of Nck2 to the cytoplasmic domain of CD3 epsilon following an allosteric change in the conformation of CD3 through binding of a conventional CD3 binding molecule, like the CD19×CD3 binding molecule, to its context dependent epitope on CD3 epsilon, can increase the adhesiveness of T cells to endothelial cells by transiently switching integrins on the T cell surface into their more adhesive isoform via inside-out-signalling.

TABLE 3
Patient demographics and clinical outcome

| | | | | | | Best |
|---|---|---|---|---|---|---|
| | | | | | Clear- | Response* |
| | | | | Dose | ance | (CR |
| | | | Disease | Level | of | Duration |
| Co- | | Age/ | (Ann Arbor | [mg/m²/ | Bone | in Months |
| hort | Patient | Sex | Classification) | Day] | Marrow | or Weeks) |
| 1 | 1 | 71/m | IC, Binet C | 0.0005 | None | SD |
| | 2 | 67/f | MCL, Stage | 0.0005 | n.d. | PD |
| | | | IV/A/E | | | |
| | 3 | 67/m | CLL, Stage | 0.0005 | n.d. | MR |
| | | | IV/B/E | | | |
| 2 | 4 | 69/m | MCL, Stage | 0.0015 | n.i. | SD |
| | | | IV/B | | | |
| | 5 | 49/m | MCL, Stage | 0.0015 | n.d. | SD |
| | | | IV/A/S | | | |
| | 6 | 71/m | MCL, Stage | 0.0015 | n.i. | PD |
| | | | IV/B/E | | | |
| | 7 | 77/m | MCL, Stage | 0.0015 | n.i. | SD |
| | | | IV/B/E/S | | | |
| | 8 | 65/m | CLL, Stage | 0.0015 | n.d. | PD |
| | | | IV/B/E/S | | | |
| | 9 | 75/m | FL, Stage II/B | 0.0015 | n.i. | SD |
| 3 | 10 | 58/m | MCL, Stage | 0.005 | n.i. | PD |
| | | | III/B/S | | | |
| | 11 | 68/f | FL, Stage IV/B | 0.005 | n.d. | SD |
| | 12 | 65/m | MCL, Stage | 0.005 | n.i. | SD |
| | | | III/A/E | | | |
| 4^{a} | 13 | 60/m | SLL, Stage | 0.015 | Complete | PR |
| | | | IV/B/S | | | |
| | 14 | 73/m | MCL, Stage | 0.015 | n.i. | SD |
| | | | II/A/E | | | |
| | 15 | 44/m | FL, Stage | 0.015 | Partial | PR |
| | | | IV/B/E/S | | | |
| | 16 | 61/m | FL, Stage | 0.015 | Complete | CR |
| | | | IV/A/S | | | (7 mo) |
| | 17 | 67/m | MZL, Stage | 0.015 | n.i. | n.e. |
| | | | IV/B/S | | | |
| | 18 | 64/m | FL, Stage | 0.015 | n.i. | PD |
| | | | IV/A/E | | | |
| | 19 | 75/m | MCL, Stage | 0.015 | n.i. | n.e. |
| | | | III/A | | | |
| | 20 | 65/f | FL; Stage III/A | 0.015 | n.i. | SD |
| | 21 | 60/m | MCL, Stage | 0.015 | None | SD |
| | | | IV/A/E | | | |
| | 22 | 67/f | FL, Stage IV/B | 0.015 | Complete | MR |
| | 23 | 67/m | DLBCL, Stage | 0.015 | n.i. | n.e. |
| | | | III/B | | | |
| | 24 | 65/f | FL, Stage III/A | 0.015 | n.d. | SD |
| | 25 | 74/f | WD, Stage IV/B | 0.015 | Partial | SD |
| 5 | 26 | 67/m | MCL, Stage | 0.03 | Complete | SD |
| | | | IV/A | | | |
| | 27 | 48/m | FL, Stage III/A | 0.03 | n.i. | PD |
| | 28 | 58/m | MCL, Stage | 0.03 | n.i. | CR |
| | | | III/A | | | (10 mo+) |
| | 29 | 45/f | MCL, Stage | 0.03 | Partial | PD |
| | | | IV/B | | | |
| | 30 | 59/m | MZL, Stage | 0.03 | n.i. | n.e. |
| | | | III/A | | | |
| | 31 | 43/m | FL, Stage III/A | 0.03 | n.i. | MR |
| 6 | 32 | 72/m | MCL, Stage | 0.06 | Complete | PR |
| | | | IV/A | | | |
| | 33 | 55/m | MCL, Stage | 0.06 | Complete | CR |
| | | | IV/B | | | (4 mo+) |
| | 34 | 52/m | FL, Stage IV/A | 0.06 | n.i. | CR^{b} |
| | | | | | | (1 w+) |

*Centrally confirmed complete (CR) and partial (PR) responses by Cheson criteria in bold; MR, minimal response (25 to <50%); SD, stable disease; PD, progressive disease; duration from first documentation of response in parentheses; + denotes an ongoing response
^{a}Cohort 4 was expanded to study three different schedules of treatment initiation
^{b}PR after 8 weeks of treatment that turned into a CR after an additional treatment cycle of 4 weeks at the same dose following 7 weeks of treatment free interval
n.e.: not evaluable, because of treatment period <7 d
n.d.: not determined (infiltrated, but no second biopsy performed at end of treatment)
n.i.: not infiltrated at start of treatment

TABLE 4
Incidence of adverse events observed during treatment

| Adverse events regardless of relationship, | | |
|---|---|---|
| occuring in ≥3 patients | Grade 1-4 | Grade 3-4 |
| (N = 34) | N (%) | N (%) |
| Pyrexia | 22 (64.7) | 2 (5.9) |
| Leukopenia | 21 (61.8) | 11 (32.4) |
| Lymphopenia | 21 (61.8) | 21 (61.8) |
| Coagulopathy (increase in D-dimers) | 16 (47.1) | 6 (17.6) |
| Enzyme abnormality (AP, LDH, CRP) | 16 (47.1) | 10 (29.4) |
| Hepatic function abnormality (ALT, AST, GGT) | 16 (47.1) | 1 (2.9) |
| Anaemia | 13 (38.2) | 5 (14.7) |
| Chills | 13 (38.2) | 0 (0.0) |
| Headache | 12 (35.3) | 1 (2.9) |
| Hypokalaemia | 12 (35.3) | 2 (5.9) |
| Thrombocytopenia | 12 (35.3) | 6 (17.6) |
| Weight increased | 12 (35.3) | 0 (0.0) |
| Hyperglycaemia | 11 (32.4) | 2 (5.9) |
| Neutropenia | 11 (32.4) | 8 (23.5) |
| Haematuria | 10 (29.4) | 0 (0.0) |
| Oedema peripheral | 10 (29.4) | 2 (5.9) |
| Anorexia | 9 (26.5) | 1 (2.9) |
| Diarrhoea | 9 (26.5) | 0 (0.0) |
| Weight decreased | 9 (26.5) | 0 (0.0) |
| Fatigue | 8 (23.5) | 1 (2.9) |
| Proteinuria | 8 (23.5) | 0 (0.0) |
| Hypocalcaemia | 7 (20.6) | 2 (5.9) |
| Pancreatic enzyme abnormality | 7 (20.6) | 0 (0.0) |
| Cough | 6 (17.6) | 0 (0.0) |
| Dyspnoea | 6 (17.6) | 0 (0.0) |
| Back pain | 5 (14.7) | 0 (0.0) |
| Catheter site pain | 5 (14.7) | 0 (0.0) |
| Hyperbilirubinaemia | 5 (14.7) | 2 (5.9) |
| Hypoalbuminaemia | 5 (14.7) | 0 (0.0) |
| Hypogammaglobulinaemia | 5 (14.7) | 1 (2.9) |
| Hypoproteinaemia | 5 (14.7) | 0 (0.0) |
| Pleural effusion | 5 (14.7) | 1 (2.9) |
| Vomiting | 5 (14.7) | 0 (0.0) |
| Asthenia | 4 (11.8) | 1 (2.9) |
| Confusional state | 4 (11.8) | 0 (0.0) |
| Constipation | 4 (11.8) | 0 (0.0) |
| Dizziness | 4 (11.8) | 0 (0.0) |
| Hypertension | 4 (11.8) | 0 (0.0) |
| Hyponatraemia | 4 (11.8) | 2 (5.9) |
| Mucosal dryness | 4 (11.8) | 0 (0.0) |
| Muscle spasms | 4 (11.8) | 0 (0.0) |
| Nausea | 4 (11.8) | 0 (0.0) |
| Night sweats | 4 (11.8) | 0 (0.0) |
| Abdominal pain | 3 (8.8) | 1 (2.9) |
| Ascites | 3 (8.8) | 0 (0.0) |
| Hypercoagulation | 3 (8.8) | 0 (0.0) |
| Hyperhidrosis | 3 (8.8) | 0 (0.0) |
| Hypoglobulinaemia | 3 (8.8) | 0 (0.0) |
| Insomnia | 3 (8.8) | 0 (0.0) |
| Liver disorder | 3 (8.8) | 1 (2.9) |
| Nasopharyngitis | 3 (8.8) | 0 (0.0) |
| Pruritus | 3 (8.8) | 0 (0.0) |

Abbreviations used are: AE, adverse event; AP, alkaline phosphatase; LDH, lactate dehydrogenase; CRP, C-reactive protein; ALT, alanine transaminase; AST, aspartate transaminase; GGT, gamma-glutamyl transferase; AE data from the additional treatment cycle of patient 34 not yet included.

[0716] As explained above, conventional CD3 binding molecules (e.g. disclosed in WO 99/54440) capable of binding to a context-dependent epitope, though functional, lead to the undesired effect of T cell redistribution in patients causing CNS adverse events. In contrast, binding molecules of the present invention, by binding to the context-independent N-terminal 1-27 amino acids of the CD3 epsilon chain, do not lead to such T cell redistribution effects. As a consequence, the CD3 binding molecules of the invention are associated with a better safety profile compared to conventional CD3 binding molecules.

### 14. Bispecific CD3 Binding Molecules of the Invention Inducing T Cell Mediated Target Cell Lysis by Recognizing a Surface Target Antigen Deplete Target Antigen Positive Cells In Vivo

[0717] A Bispecific CD3 Binding Molecule of the Invention Recognizing CD33 as Target Antigen Depletes CD33-Positive Circulating Monocytes from the Peripheral Blood of Cynomolgus Monkeys

[0718] CD33-AF5 VH-VL×I2C VH-VL (amino acid sequence: SEQ ID NO. 267) was produced by expression in CHO cells using the coding nucleotide sequence SEQ ID NO. 268. The coding sequences of (i) an N-terminal immunoglobulin heavy chain leader comprising a start codon embedded within a Kozak consensus sequence and (ii) a C-terminal His₆-tag followed by a stop codon were both attached in frame to the nucleotide sequence SEQ ID NO 268 prior to insertion of the resulting DNA-fragment as obtained by gene synthesis into the multiple cloning site of the expression vector pEF-DHFR (Raum et al. Cancer Immunol Immunother 50 (2001) 141-150). Stable transfection of DHFR-deficient CHO cells, selection for DHFR-positive transfectants secreting the CD3 binding molecule CD33-AF5 VH-VL×I2C VH-VL into the culture supernatant and gene amplification with methotrexat for increasing expression levels were carried out as described (Mack et al. Proc. Natl. Acad. Sci. USA 92 (1995) 7021-7025). The analytical SEC-profile of CD33-AF5 VH-VL×I2C VH-VL for use in cynomolgus monkeys revealed that the test material almost exclusively consisted of monomer. The potency of the test material was measured in a cytotoxicity assay as described in example 16.5 using CHO cells transfected with cynomolgus CD33 as target cells and the macaque T cell line 4119LnPx as source of effector cells (FIG. 25). The concentration of CD33-AF5 VH-VL×I2C VH-VL required for half-maximal target cell lysis by the effector T cells (EC50) was determined to be 2.7 ng/ml.

[0719] Young (approx. 3 years old) adult cynomolgus monkeys (Macaca fascicularis) were treated by continuous intravenous infusion of CD3 binding molecule CD33-AF5 VH-VL×I2C VH-VL at different flow-rates (i.e. dose levels) to study depletion of circulating CD33-positive monocytes from the peripheral blood. This situation is equivalent to the treatment with the conventional CD3 binding molecule CD19×CD3 (specific for CD19 on B cells and CD3 on T cells) of those B-NHL patients, who have circulating CD19-positive target B cells (see e.g. WO99/54440). Depletion of circulating CD19-positive target B cells from the peripheral blood had turned out as a valid surrogate for the general clinical efficacy of the conventional CD3 binding molecule (CD19×CD3 as provided in WO99/54440) in patients with CD19-positive B-cell malignomas like B-NHL. Likewise, depletion of circulating CD33-positive monocytes from the peripheral blood is regarded as a valid surrogate of the general clinical efficacy of CD33-directed bispecific CD3 binding molecules of the invention like CD33-AF5 VH-VL×I2C VH-VL in patients with CD33-positive myeloid malignomas like AML (acute myeloid leukemia).

[0720] Continuous infusion was carried out according to the Swivel method as follows: The monkeys are catheterized via the vena femoralis into the vena cava caudalis using a vein catheter. The catheter is tunneled subcutaneously to the dorsal shoulder region and exteriorized at the caudal scapula. Then a tube is passed through a jacket and a protection spring. The jacket is fastened around the animal and the catheter, via the tube, is connected to an infusion pump.

[0721] Administration solution (1.25 M lysine, 0.1% tween 80, pH 7) without test material was infused continuously at 48 ml/24 h for 7 days prior to treatment start to allow acclimatization of the animals to the infusion conditions. Treatment was started by adding CD33-AF5 VH-VL×I2C VH-VL test material to the administration solution at the amount required for each individual dose level to be tested (i.e. flow rate of CD33-AF5 VH-VL×I2C VH-VL). The infusion reservoir was changed every day throughout the whole acclimatization and treatment phase. Planned treatment duration was 7 days except for the 120 μg/m²/24 h dose level, where animals received 14 days of treatment.

[0722] Time courses of absolute counts in circulating T cells and CD33-positive monocytes were determined by 4- or 3-colour FACS analysis, respectively:

### Collection of Blood Samples and Routine Analysis

[0723] Blood samples (1 ml) were obtained before and 0.75, 2, 6, 12, 24, 30, 48, 72 hours after start of continuous infusion with MCSP-G4 VH-VL×I2C VH-VL as well as after 7 and 14 days (and after 9 days at the 120 μg/m²/24 h dose level) of treatment using EDTA-containing Vacutainer™ tubes (Becton Dickinson) which were shipped for analysis at 4° C. In some cases slight variations of these time points occurred for operational reasons. FAGS analysis of lymphocyte subpopulations was performed within 24-48 h after blood sample collection. Absolute numbers of leukocyte subpopulations in the blood samples were determined through differential blood analysis in a routine veterinary lab.

Isolation of PBMC from Blood Samples

[0724] PBMC (peripheral blood mononuclear cells) were isolated in analogy to the protocol described in example 13, above, with adaptations of the used volumes.

Staining of PBMC with Fluorescence-Labeled Antibodies Against Cell Surface Molecules

[0725] Monoclonal antibodies reactive with cynomolgus antigens were obtained from Becton Dickinson (¹Cat. No. 345784, ²Cat. No. 556647, ³Cat. No. 552851, ⁶Cat. No. 557710), Beckman Coulter (⁴Cat. No. IM2470) and Miltenyi (⁵Cat. No. 130-091-732) and used according to the manufacturers' recommendations. 5×10⁵-1×10⁶ cells were stained with the following antibody combinations: anti-CD14¹ (FITC)×anti-CD56² (PE)×anti-CD3³ (PerCP)×anti-CD19⁴ (APC) and anti-CD14¹ (FITC)×anti-CD33⁵ (PE)×anti-CD16⁶ (Alexa Fluor 647TH). Additional steps were performed as described in example 13, above.

### Flowcytometric Detection of Stained Lymphocytes by FACS

[0726] Data collection was performed with a 4 color BD FACSCalibur™ (Becton Dickinson). For each measurement 1×10⁴ cells of defined lymphocyte subpopulations were acquired. Statistical analysis was performed with the program CellQuest Pro™ (Becton Dickinson) to obtain lymphocyte subpopulation percentages and to classify cell surface molecule expression intensity. Subsequently, percentages of single lymphocyte subsets related to total lymphocytes (i.e. B plus T plus NK cells excluding myeloid cells via CD14-staining) as determined by FACS were correlated with the lymphocyte count from the differential blood analysis to calculate absolute cell numbers of T cells (CD3⁺, CD56⁻, CD14⁻). Absolute numbers of CD33-positive monocytes were calculated by multiplying the monocyte counts from the differential blood analysis with the corresponding ratios of CD33-positive monocytes (CD33⁺, CD14⁺) to all monocytes (CD14⁺) as determined by FACS.

[0727] The percentage compared to baseline (i.e. 100%) of absolute circulating CD33-positive monocyte counts at the end of treatment with CD33-AF5 VH-VL×I2C VH-VL in 4 cohorts of 2 cynomolgus monkeys with inter-cohort dose escalation from 30 over 60 and 240 to 1000 μg/m²/24 h are shown in FIG. 26 A.

[0728] As shown in FIG. 26 A, continuous intravenous infusion of CD33-AF5 VH-VL×I2C VH-VL induces depletion of circulating CD33-positive monocytes in a dose-dependent manner. While there was still no detectable depletion of circulating CD33-positive monocytes at 30 μg/m²/24 h, a first trend towards a reduction of CD33-positive monocyte counts became visible at 60 μg/m²/24 h after 7 days of treatment. At 240 μg/m²/24 h circulating CD33-positive monocytes were almost completely depleted from the peripheral blood after 3 days of treatment. This was reached even faster at 1000 μg/m²/24 h, where depletion of the circulating CD33-positive monocytes from the peripheral blood was completed already after 1 day of treatment. This finding was confirmed by the results shown in FIG. 26 B demonstrating depletion of circulating CD33-positive monocytes by two thirds and 50% compared to the respective baseline in two cynomolgus monkeys treated by continuous infusion with CD33-AF5 VH-VL×I2C VH-VL at 120 μg/m²/24 h for 14 days.

[0729] This outcome is a clear signal clinical efficacy of the CD3 binding molecules of the invention in general and of bispecific CD33-directed CD3 binding molecules of the invention for the treatment of CD33-positive malignomas like AML in particularly. Moreover, the T cell redistribution during the starting phase of treatment with CD33-AF5 VH-VL×I2C VH-VL in the presence of circulating target cells (i.e. CD33-positive monocytes) seems to be less pronounced than T cell redistribution during the starting phase of treatment with conventional CD19×CD3 constructs, as described in WO99/54440 in B-NHL patients with a significant number of circulating target cells (i.e. CD19-positive B cells) as shown in FIG. 22. While T cells disappear completely from the circulation upon start of CD19×CD3 infusion and do not reappear until the circulating CD19-positive target B cells are depleted from the peripheral blood (FIG. 22), initial disappearance of circulating T cells is incomplete upon infusion start with CD33-AF5 VH-VL×I2C VH-VL and T cell counts recover still during the presence of circulating CD33-positive target cells (FIG. 26 B). This confirms that CD3 binding molecules of the invention (directed against and generated against an epitope of human and non-chimpanzee primates CD3E (epsilon) chain and being a part or fragment or the full length of the amino acid sequence as provided in SEQ ID Nos. 2, 4, 6, or 8) by recognizing a context-independent CD3 epitope show a more favorable T cell redistribution profile than conventional CD3 binding molecules recognizing a context-dependent CD3 epitope, like the binding molecules provided in WO99/54440.

15. CD3 Binding Molecules of the Invention Directed at Essentially Context Independent CD3 Epitopes by Inducing Less Redistribution of Circulating T Cells in the Absence of Circulating Target Cells Reduce the Risk of Adverse Events Related to the Initiation of Treatment
Reduced T Cell Redistribution in Cynomolgus Monkeys Following Initiation of Treatment with a Representative Cross-Species Specific CD3 Binding Molecule of the Invention

[0730] MCSP-G4 VH-VL×I2C VH-VL (amino acid sequence: SEQ ID NO. 193) was produced by expression in CHO cells using the coding nucleotide sequence SEQ ID NO. 194. The coding sequences of (i) an N-terminal immunoglobulin heavy chain leader comprising a start codon embedded within a Kozak consensus sequence and (ii) a C-terminal His6-tag followed by a stop codon were both attached in frame to the nucleotide sequence SEQ ID NO. 194 prior to insertion of the resulting DNA-fragment as obtained by gene synthesis into the multiple cloning site of the expression vector pEF-DHFR (Raum et al. Cancer Immunol Immunother 50 (2001) 141-150). Stable transfection of DHFR-deficient CHO cells, selection for DHFR-positive transfectants secreting the CD3 binding molecule MCSP-G4 VH-VL×I2C VH-VL into the culture supernatant and gene amplification with methotrexat for increasing expression levels were carried out as described (Mack et al. Proc. Natl. Acad. Sci. USA 92 (1995) 7021-7025). Test material for treatment of cynomolgus monkeys was produced in a 200-liter fermenter. Protein purification from the harvest was based on IMAC affinity chromatography targeting the C-terminal His6-tag of MCSP-G4 VH-VL×I2C VH-VL followed by preparative size exclusion chromatography (SEC). The total yield of final endotoxin-free test material was 40 mg. The test material consisted of 70% monomer, 30% dimer and a small contamination of higher multimer. The potency of the test material was measured in a cytotoxicity assay as described in example 11 using CHO cells transfected with cynomolgus MCSP as target cells and the macaque T cell line 4119LnPx as source of effector cells (FIG. 27). The concentration of MCSP-G4 VH-VL×I2C VH-VL required for half-maximal target cell lysis by the effector T cells (EC50) was determined to be 1.9 ng/ml.

[0731] Young (approx. 3 years old) adult cynomolgus monkeys (Macaca fascicularis) were treated by continuous intravenous infusion of CD3 binding molecule MCSP-G4 VH-VL×I2C VH-VL at different flow-rates (i.e. dose levels) to study redistribution of circulating T cells following initiation of treatment in the absence of circulating target cells. Although the CD3 binding molecule MCSP-G4 VH-VL×I2C VH-VL can recognize both cynomolgus MCSP and cynomolgus CD3, there are no circulating blood cells expressing MCSP. Therefore, the only interaction possible in the circulating blood is binding of the CD3-specific arm of MCSP-G4 VH-VL×12C VH-VL to CD3 on T cells. This situation is equivalent to the treatment with the conventional CD3 binding molecule (CD19×CD3 binding molecule specific for CD19 on B cells and CD3 on T cells) of those B-NHL patients, who have no circulating CD19-positive target B cells as described in example 13.

[0732] Continuous infusion was carried out according to the Swivel method as follows: The monkeys are catheterized via the vena femoralis into the vena cava caudalis using a vein catheter. The catheter is tunneled subcutaneously to the dorsal shoulder region and exteriorized at the caudal scapula. Then a tube is passed through a jacket and a protection spring. The jacket is fastened around the animal and the catheter, via the tube, is connected to an infusion pump.

[0733] Administration solution (1.25 M lysine, 0.1% tween 80, pH 7) without test material was infused continuously at 48 ml/24 h for 7 days prior to treatment start to allow acclimatization of the animals to the infusion conditions. Treatment was started by adding MCSP-G4 VH-VL×I2C VH-VL test material to the administration solution at the amount required for each individual dose level to be tested (i.e. flow rate of MCSP-G4 VH-VL×I2C VH-VL). The infusion reservoir was changed every day throughout the whole acclimatization and treatment phase. Treatment duration was 7 days.

[0734] Time courses of absolute T-cell counts in peripheral blood were determined by four color FACS analysis as follows:

### Collection of Blood Samples and Routine Analysis

[0735] Blood samples (1 ml) were obtained before and 0.75, 2, 6, 12, 24, 30, 48, 72 hours after start of continuous infusion with MCSP-G4 VH-VL×I2C VH-VL as well as after 7 days of treatment using EDTA-containing Vacutainer™ tubes (Becton Dickinson) which were shipped for analysis at 4° C. In some cases slight variations of these time points occurred for operational reasons. FACS analysis of lymphocyte subpopulations was performed within 24-48 h after blood sample collection. Absolute numbers of leukocyte subpopulations in the blood samples were determined through differential blood analysis in a routine veterinary lab.

Isolation of PBMC from Blood Samples

[0736] PBMC were isolated in analogy to the protocol described in example 13, above, with adaptations of the used volumes.

Staining of PBMC with Fluorescence-Labeled Antibodies Against Cell Surface Molecules

[0737] Monoclonal antibodies reactive with cynomolgus antigens were obtained from Becton Dickinson (¹Cat. No. 345784, ²Cat. No. 556647, ³Cat. No. 552851) and Beckman Coulter (⁴Cat. No. IM2470) used according to the manufacturers' recommendations. 5×10⁵-1×10⁶ cells were stained with the following antibody combination: anti-CD14¹ (FITC)×anti-CD56² (PE)×anti-CD3³ (PerCP)×anti-CD19⁴ (APC). Additional steps were performed as described in example 13, above.

### Flowcytometric Detection of Stained Lymphocytes by FACS

[0738] Data collection was performed with a 4 color BD FACSCalibur™ (Becton Dickinson). For each measurement 1×10⁴ cells of defined lymphocyte subpopulations were acquired. Statistical analysis was performed with the program CellQuest Pro™ (Becton Dickinson) to obtain lymphocyte subpopulation percentages and to classify cell surface molecule expression intensity. Subsequently, percentages of single lymphocyte subsets related to total lymphocytes (i.e. B plus T plus NK cells excluding myeloid cells via CD14-staining) as determined by FAGS were correlated with the lymphocyte count from the differential blood analysis to calculate absolute cell numbers of T cells (CD3⁺, CD56⁻, CD14⁻).

[0739] T cell redistribution during the starting phase of treatment with MCSP-G4 VH-VL x I2C VH-VL in cynomolgus monkeys at dose levels of 60, 240 and 1000 μg/m²/24 h is shown in FIG. 28. These animals showed no signs at all of any T cell redistribution during the starting phase of treatment, i.e. T cell counts rather increased than decreased upon treatment initiation. Given that T cell redistribution is consistently observed in 100% of all patients without circulating target cells, upon treatment initiation with the conventional CD3 binding molecule (e.g. CD19×CD3 construct as described in WO 99/54440) against a context dependent CD3 epitope, it was demonstrated that substantially less T cell redistribution in the absence of circulating target cells upon treatment initiation can be observed with a CD3 binding molecule of the invention directed and generated against an epitope of human an non-chimpanzee primate CD3 epsilon chain as defined by the amino acid sequence of anyone of SEQ ID NOs: 2, 4, 6, or 8 or a fragment thereof. This is in clear contrast to CD3-binding molecules directed against a context-dependent CD3 epitope, like the constructs described in WO 99/54440, The binding molecules against context-independent CD3 epitopes, as (inter alia) provided in any one of SEQ ID NOs: 2, 4, 6, or 8 (or fragments of these sequences) provide for this substantially less (detrimental and non-desired) T cell redistribution. Because T cell redistribution during the starting phase of treatment with CD3 binding molecules is a major risk factor for CNS adverse events, the CD3 binding molecules provided herein and capable of recognizing a context independent CD3 epitope have a substantial advantage over the CD3 binding molecules known in the art and directed against context-dependent CD3 epitopes. Indeed none of the cynomolgus monkeys treated with MCSP-G4 VH-VL×I2C VH-VL showed any signs of CNS symptoms.

[0740] The context-independence of the CD3 epitope is provided in this invention and corresponds to the first 27 N-terminal amino acids of CD3 epsilon) or fragments of this 27 amino acid stretch. This context-independent epitope is taken out of its native environment within the CD3 complex and fused to heterologous amino acid sequences without loss of its structural integrity. Anti-CD3 binding molecules as provided herein and generated (and directed) against a context-independent CD3 epitope provide for a surprising clinical improvement with regard to T cell redistribution and, thus, a more favorable safety profile. Without being bound by theory, since their CD3 epitope is context-independent, forming an autonomous selfsufficient subdomain without much influence on the rest of the CD3 complex, the CD3 binding molecules provided herein induce less allosteric changes in CD3 conformation than the conventional CD3 binding molecules (like molecules provided in WO 99/54440), which recognize context-dependent CD3 epitopes like molecules provided in WO 99/54440. As a consequence (again without being bound by theory), the induction of intracellular NcK2 recruitment by the CD3 binding molecules provided herein is also reduced resulting in less isoform switch of T cell integrins and less adhesion of T cells to endothelial cells. It is preferred that preparations of CD3 binding molecules of the invention (directed against and generated against a context-independent epitope as defined herein) essentially consists of monomeric molecules. These monomeric molecules are even more efficient (than dimeric or multimeric molecules) in avoiding T cell redistribution and thus the risk of CNS adverse events during the starting phase of treatment.

### 16. Generation and Characterization of CD33 and CD3 Cross-Species Specific Bispecific Single Chain Molecules

### 16.1. Generation of CHO Cells Expressing Human CD33

[0741] The coding sequence of human CD33 as published in GenBank (Accession number NM_001772) was obtained by gene synthesis according to standard protocols. The gene synthesis fragment was designed as to contain first a Kozak site for eukaryotic expression of the construct, followed by a 19 amino acid immunoglobulin leader peptide, followed in frame by the coding sequence of the mature human CD33 protein, followed in frame by the coding sequence of serine glycine dipeptide, a histidine₆-tag and a stop codon (the cDNA and amino acid sequence of the construct is listed under SEQ ID Nos 305 and 306). The gene synthesis fragment was also designed as to introduce restriction sites at the beginning and at the end of the fragment. The introduced restriction sites, EcoRI at the 5′ end and SalI at the 3′ end, were utilised in the following cloning procedures. The gene synthesis fragment was cloned via EcoRI and SalI into a plasmid designated pEF-DHFR (pEF-DHFR is described in Raum et al. Cancer Immunol Immunother 50 (2001) 141-150) following standard protocols. The aforementioned procedures were carried out according to standard protocols (Sambrook, Molecular Cloning; A Laboratory Manual, 3rd edition, Cold Spring Harbour Laboratory Press, Cold Spring Harbour, New York (2001)). A clone with sequence-verified nucleotide sequence was transfected into DHFR deficient CHO cells for eukaryotic expression of the construct. Eukaryotic protein expression in DHFR deficient CHO cells was performed as described by Kaufmann R. J. (1990) Methods Enzymol. 185, 537-566. Gene amplification of the construct was induced by increasing concentrations of methothrexate (MTX) to a final concentration of up to 20 nM MTX.

### 16.2. Generation of CHO Cells Expressing the Extracellular Domain of Macaque CD33

[0742] The cDNA sequence of macaque CD33 was obtained by a set of 3 PCRs on cDNA from macaque monkey bone marrow prepared according to standard protocols. The following reaction conditions: 1 cycle at 94° C. for 3 minutes followed by 35 cycles with 94° C. for 1 minute, 53° C. for 1 minute and 72° C. for 2 minutes followed by a terminal cycle of 72° C. for 3 minutes and the following primers were used:

1.
forward primer:
(SEQ ID No. 369)
5′-gaggaattcaccatgccgctgctgctactgctgcccctgctgtggg
caggggccctggctatgg-3′
reverse primer:
(SEQ ID No. 370)
5′-gatttgtaactgtatttggtacttcc-3′
2.
forward primer:
(SEQ ID No. 371)
5′-attccgcctccttggggatcc-3′
reverse primer:
(SEQ ID No. 372)
5′-gcataggagacattgagctggatgg-3′
3.
forward primer:
(SEQ ID No. 373)
5′-gcaccaacctgacctgtcagg-3′
reverse primer:
(SEQ ID No. 374)
5′-agtgggtcgactcactgggtcctgacctctgagtattcg-3′

[0743] Those PCRs generate three overlapping fragments, which were isolated and sequenced according to standard protocols using the PCR primers, and thereby provided a portion of the cDNA sequence of macaque CD33 from the second nucleotide of codon +2 to the third nucleotide of codon +340 of the mature protein. To generate a construct for expression of macaque CD33 a cDNA fragment was obtained by gene synthesis according to standard protocols (the cDNA and amino acid sequence of the construct is listed under SEQ ID Nos 307 and 308). In this construct the coding sequence of macaque CD33 from amino acid +3 to +340 of the mature CD33 protein was fused into the coding sequence of human CD33 replacing the human coding sequence of the amino acids +3 to +340. The gene synthesis fragment was also designed as to contain a Kozak site for eukaryotic expression of the construct and restriction sites at the beginning and the end of the fragment containing the cDNA coding for essentially the whole extracellular domain of macaque CD33, the macaque CD33 transmembrane domain and a macaque-human chimeric intracellular CD33 domain. The introduced restriction sites XbaI at the 5′ end and SalI at the 3′ end, were utilised in the following cloning procedures. The gene synthesis fragment was then cloned via XbaI and SalI into a plasmid designated pEF-DHFR (pEF-DHFR is described in Raum et al. Cancer Immunol Immunother 50 (2001) 141-150). A sequence verified clone of this plasmid was used to transfect CHO/dhfr− cells as described above.

### 16.3. Generation of CD33 and CD3 Cross-Species Specific Bispecific Antibody Molecules

### Cloning of Cross-Species Specific Binding Molecules

[0744] Generally, bispecific antibody molecules, each comprising a domain with a binding specificity cross-species specific for human and non-chimpanzee primate CD3 epsilon as well as a domain with a binding specificity cross-species specific for human and non-chimpanzee primate CD33, were designed as set out in the following Table 5:

TABLE 5
Formats of anti-CD3 and anti-CD33 cross-
species specific bispecific molecules

| SEQ ID | Formats of protein constructs |
|---|---|
| (nucl/prot) | (N → C) |
| 276/275 | AH11HLxH2CHL |
| 258/257 | AH3HLxH2CHL |
| 270/269 | AC8HLxH2CHL |
| 264/263 | AF5HLxH2CHL |
| 288/287 | F2HLxH2CHL |
| 300/299 | E11HLxH2CHL |
| 282/281 | B3HLxH2CHL |
| 294/293 | B10HLxH2CHL |
| 278/277 | AH11HLxF12QHL |
| 260/259 | AH3HLxF12QHL |
| 272/271 | AC8HLxF12QHL |
| 266/265 | AF5HLxF12QHL |
| 290/289 | F2HLxF12QHL |
| 302/301 | E11HLxF12QHL |
| 284/283 | B3HLxF12QHL |
| 296/295 | B10HLxF12QHL |
| 280/279 | AH11HLxI2CHL |
| 262/261 | AH3HLxI2CHL |
| 274/273 | AC8HLxI2CHL |
| 268/267 | AF5HLxI2CHL |
| 292/291 | F2HLxI2CHL |
| 304/303 | E11HLxI2CHL |
| 286/285 | B3HLxI2CHL |
| 298/297 | B10HLxI2CHL |

[0745] The aforementioned constructs containing the variable light-chain (L) and variable heavy-chain (H) domains cross-species specific for human and macaque CD33 and the CD3 specific VH and VL combinations cross-species specific for human and macaque CD3 were obtained by gene synthesis. The gene synthesis fragments were designed and eukaryotic protein expression was performed similar as described in example 9 for the MCSP and CD3 cross-species specific single chain molecules.

[0746] The same holds true for the expression and purification of the CD33 and CD3 cross-species specific single chain molecules.

[0747] In the Western Blot a single band was detected at 52 kD corresponding to the purified bispecific antibody.

### 16.4. Flow Cytometric Binding Analysis of the CD33 and CD3 Cross-Species Specific Bispecific Antibodies

[0748] In order to test the functionality of the cross-species specific bispecific antibody constructs regarding the capability to bind to human and macaque CD33 and CD3, respectively, a FACS analysis was performed similar to the analysis described for the analysis of the MCSP and CD3 cross-species specific bispecific antibodies in example 10 using CHO cells expressing the human or macaque CD33 extracellular domains (see example 16.1 and 16.2).

[0749] The specific binding of human and non-chimpanzee primate CD3 of the CD3 binding molecules of the invention was clearly detectable as shown in FIG. 29. In the FAGS analysis all constructs show binding to CD3 and CD33 as compared to the respective negative controls. Cross-species specificity of the bispecific antibodies to human and macaque CD3 and CD33 antigens is demonstrated.

### 16.5. Bioactivity of CD33 and CD3 Cross-Species Specific Bispecific Antibodies

[0750] Bioactivity of the generated bispecific antibodies was analyzed by chromium 51 (⁵¹Cr) release in vitro cytotoxicity assays using the CD33 positive cell lines described in Examples 16.1 and 16.2. As effector cells stimulated human CD4/CD56 depleted PBMC or the macaque T cell line 4119LnPx were used as specified in the respective figures. The cytotoxicity assays were performed similar to the setting described for the bioactivity analysis of the MCSP and CD3 cross-species specific bispecific antibodies in example 11 using CHO cells expressing the human or macaque CD33 extracellular domains (see example 16.1 and 16.2) as target cells.

[0751] As shown in FIG. 30, all of the generated cross-species specific bispecific constructs demonstrate cytotoxic activity against human CD33 positive target cells elicited by stimulated human CD4/CD56 depleted PBMC and against macaque CD33 positive target cells elicited by the macaque T cell line 4119LnPx.

### 17. Purification of Cross-Species Specific Bispecific Single Chain Molecules by an Affinity Procedure Based on the Context Independent CD3 Epsilon Epitope Corresponding to the N-Terminal Amino Acids 1-27

### 17.1 Generation of an Affinity Column Displaying the Isolated Context Independent Human CD3 Epsilon Epitope Corresponding to the N-Terminal Amino Acids 1-27

[0752] The plasmid for expression of the construct 1-27 CD3-Fc consisting of the 1-27 N-terminal amino acids of the human CD3 epsilon chain fused to the hinge and Fc gamma region of human immunoglobulin IgG1 described above (Example 3; cDNA sequence and amino acid sequence of the recombinant fusion protein are listed under SEQ ID NOs 230 and 229) was transfected into DHFR deficient CHO cells for eukaryotic expression of the construct. Eukaryotic protein expression in DHFR deficient CHO cells was performed as described by Kaufmann R. J. (1990) Methods Enzymol. 185, 537-566. Gene amplification of the construct was induced by increasing concentrations of methotrexate (MTX) to a final concentration of up to 20 nM MTX. After two passages of stationary culture the cells were grown in roller bottles with nucleoside-free HyQ PF CHO liquid soy medium (with 4.0 mM L-Glutamine with 0.1% Pluronic F-68; HyClone) for 7 days before harvest. The cells were removed by centrifugation and the supernatant containing the expressed protein was stored at −20° C. For the isolation of the fusion protein a goat anti-human fc affinity column was prepared according to standard protocols using a commercially available affinity purified goat anti-human IgG fc fragment specific antibody with minimal cross-reaction to bovine, horse, and mouse serum proteins (Jackson ImmunoResearch Europe Ltd.). Using this affinity column the fusion protein was isolated out of cell culture supernatant on an Äkta Explorer System (GE Amersham) and eluted by citric acid. The eluate was neutralized and concentrated. After dialysis against amine free coupling buffer the purified fusion protein was coupled to an N-Hydroxy-Succinimide NHS activated 1 ml HiTrap column (GE Amersham).

[0753] After coupling remaining NHS groups were blocked and the column was washed and stored at 5° C. in storage buffer containing 0.1% sodium azide. 17.2 Purification of cross-species specific bispecific single chain molecules using a human CD3 peptide affinity column

[0754] 200 ml cell culture supernatant of cells expressing cross-species specific bispecific single chain molecules were 0.2 μm sterile filtered and applied to the CD3 peptide affinity column using an Äkta Explorer system (GE Amersham).

[0755] The column was then washed with phosphate buffered saline PBS pH 7.4 to wash out unbound sample. Elution was done with an acidic buffer pH 3.0 containing 20 mM Citric acid and 1 M sodium chloride. Eluted protein was neutralized immediately by 1 M Trishydroxymethylamine TRIS pH 8.3 contained in the collection tubes of the fraction collector.

[0756] Protein analysis was done by SDS PAGE and Western Blot.

[0757] For SDS PAGE BisTris Gels 4-12% are used (Invitrogen). The running buffer was 1×MES-SDS-Puffer (Invitrogen). As protein standard 15 μl prestained Sharp Protein Standard (Invitrogen) was applied. Electrophoresis was performed for 60 minutes at 200 volts 120 mA max. Gels were washed in demineralised water and stained with Coomassie for one hour. Gels are destained in demineralised water for 3 hours. Pictures are taken with a Syngene Gel documentation system.

[0758] For Western Blot a double of the SDS PAGE gel was generated and proteins were electroblotted onto a nitrocellulose membrane. The membrane was blocked with 2% bovine serum albumin in PBS and incubated with a biotinylated murine Penta His antibody (Qiagen). As secondary reagent a streptavidin alkaline phosphatase conjugate (DAKO) was used. Blots were developed with BCIP/NBT substrate solution (Pierce).

[0759] As demonstrated in FIGS. 31, 32 and 33 the use of a human CD3 peptide affinity column as described above allows the highly efficient purification of the bispecific single chain molecules from cell culture supernatant. The cross-species specific anti-CD3 single chain antibodies contained in the bispecific single chain molecules therefore enable via their specific binding properties an efficient generic one-step method of purification for the cross-species specific bispecific single chain molecules, without the need of any tags solely attached for purification purposes.

### 18. Generic Pharmacokinetic Assay for Cross-Species Specific Bispecific Single Chain Molecules

### 18.1 Production of 1-27 CD3-Fc for Use in the Pharmacokinetic Assay

[0760] The coding sequence of the 1-27 N-terminal amino acids of the human CD3 epsilon chain fused to the hinge and Fc gamma region of human immunoglobulin IgG1 was obtained by gene synthesis according to standard protocols (cDNA sequence and amino acid sequence of the recombinant fusion protein are listed under SEQ ID NOs 309 and 310). The gene synthesis fragment was designed as to contain first a Kozak site for eukaryotic expression of the construct, followed by a 19 amino acid immunoglobulin leader peptide, followed in frame by the coding sequence of the first 27 amino acids of the extracellular portion of the mature human CD3 epsilon chain, followed in frame by the coding sequence of the hinge region and Fc gamma portion of human IgG1 and a stop codon. The gene synthesis fragment was also designed and cloned as described in example 3.1, supra. A clone with sequence-verified nucleotide sequence was transfected into DHFR deficient CHO cells for eukaryotic expression of the construct. Eukaryotic protein expression in DHFR deficient CHO cells was performed as described in example 9, supra. For the isolation of the fusion protein a goat anti-human fc affinity column was prepared according to standard protocols using a commercially available affinity purified goat anti-human IgG fc fragment specific antibody with minimal cross-reaction to bovine, horse, and mouse serum proteins (Jackson ImmunoResearch Europe Ltd.). Using this affinity column the fusion protein was isolated out of cell culture supernatant on an Äkta Explorer System (GE Amersham) and eluted by citric acid. The eluate was neutralized and concentrated.

### 18.2 Pharmacokinetic Assay for Cross-Species Specific Bispecific Single Chain Molecules

[0761] The assay is based on the ECL-ELISA technology using ruthenium labelled detection on carbon plates measured on a Sektor Imager device (MSD). In a first step, carbon plates (MSD High Bind Plate 96 well Cat: L15×B-3) were coated with 5 μl/well at 50 ng/ml of the purified 1-27 CD3-Fc described in Example 18.1. The plate was then dried overnight at 25° C. Subsequently plates were blocked with 5% BSA (Paesel&Lorei #100568) in PBS at 150 μl/well for 1 h at 25° C. in an incubator while shaking (700 rpm). In the next step plates were washed three times with 0.05% Tween in PBS. A standard curve in 50% macaque serum in PBS was generated by serial 1:4 dilution starting at 100 ng/ml of the respective cross-species specific bispecific single chain molecule to be detected in the assay. Quality control (QC) samples were prepared in 50% macaque serum in PBS ranging from 1 ng/ml to 50 ng/ml of the respective cross-species specific bispecific single chain molecule dependent on the expected sample serum concentrations. Standard, QC or unknown samples were transferred to the carbon plates at 10 μl/well and incubated for 90 min at 25° C. in the incubator while shaking (700 rpm). Subsequently plates were washed three times with 0.05% Tween in PBS. For detection 25 μl/well of penta-His-Biotin antibody (Qiagen, 200 μg/ml in 0.05% Tween in PBS) was added and incubated for 1 h at 25° C. in an incubator while shaking (700 rpm). In a second detection step 25 μl/well Streptavidin-SulfoTag solution (MSD; Cat: R32AD-1; Lot: W0010903) was added and incubated for 1 h at 25° C. in an incubator while shaking (700 rpm). Subsequently plates were washed three times with 0.05% Tween in PBS. Finally 150 μl/well MSD Reading Buffer (MSD, Cat: R9ZC-1) was added and plates were read in the Sektor Imager device.

[0762] FIGS. 34 and 35 demonstrate the feasibility of detection of cross-species specific bispecific single chain molecules in serum samples of macaque monkeys for cross-species specific bispecific single chain molecules. The cross-species specific anti-CD3 single chain antibodies contained in the bispecific single chain molecules enable therefore via their specific binding properties a highly sensitive generic assay for detection of the cross-species specific bispecific single chain molecules. The assay set out above can be used in the context of formal toxicological studies that are needed for drug development and can be easily adapted for measurement of patient samples in connection with the clinical application of cross-species specific bispecific single chain molecules.

19. Generation of Recombinant Transmembrane Fusion Proteins of the N-Terminal Amino Acids 1-27 of CD3 Epsilon from Different Non-Chimpanzee Primates Fused to EpCAM from Cynomolgus Monkey (1-27 CD3-EpCAM).

### 19.1 Cloning and Expression of 1-27 CD3-EpCAM

[0763] CD3 epsilon was isolated from different non-chimpanzee primates (marmoset, tamarin, squirrel monkey) and swine. The coding sequences of the 1-27 N-terminal amino acids of CD3 epsilon chain of the mature human, common marmoset (Callithrix jacchus), cottontop tamarin (Saguinus oedipus), common squirrel monkey (Saimiri sciureus) and domestic swine (Sus scrofa; used as negative control) fused to the N-terminus of Flag tagged cynomolgus EpCAM were obtained by gene synthesis according to standard protocols (cDNA sequence and amino acid sequence of the recombinant fusion proteins are listed under SEQ ID NOs 231 to 240). The gene synthesis fragments were designed as to contain first a BsrGI site to allow for fusion in correct reading frame with the coding sequence of a 19 amino acid immunoglobulin leader peptide already present in the target expression vector, which was followed in frame by the coding sequence of the N-terminal 1-27 amino acids of the extracellular portion of the mature CD3 epsilon chains, which was followed in frame by the coding sequence of a Flag tag and followed in frame by the coding sequence of the mature cynomolgus EpCAM transmembrane protein. The gene synthesis fragments were also designed to introduce a restriction site at the end of the cDNA coding for the fusion protein. The introduced restriction sites BsrGI at the 5′ end and SalI at the 3′ end, were utilized in the following cloning procedures. The gene synthesis fragments were then cloned via BsrGI and SalI into a derivative of the plasmid designated pEF-DHFR (pEF-DHFR is described in Raum et al. Cancer Immunol Immunother 50 (2001) 141-150), which already contains the coding sequence of the 19 amino acid immunoglobulin leader peptide following standard protocols. Sequence verified plasmids were used to transfect DHFR deficient CHO cells for eukaryotic expression of the construct. Eukaryotic protein expression in DHFR deficient CHO cells was performed as described by Kaufmann R. J. (1990) Methods Enzymol. 185, 537-566. Gene amplification of the construct was induced by increasing concentrations of methotrexate (MTX) to a final concentration of up to 20 nM MTX.

[0764] Transfectants were tested for cell surface expression of the recombinant transmembrane protein via an FACS assay according to standard protocols. For that purpose a number of 2.5×10⁵ cells were incubated with 50 μl of the anti-Flag M2 antibody (Sigma-Aldrich Chemie GmbH, Taufkirchen, Germany) at 5 μg/ml in PBS with 2% FCS. Bound antibody was detected with an R-Phycoerythrin-conjugated affinity purified F(ab′)2 fragment, goat anti-mouse IgG, Fc-gamma fragment specific 1:100 in PBS with 2% FCS (Jackson ImmunoResearch Europe Ltd., Newmarket, Suffolk, UK). Flow cytometry was performed on a FACS-Calibur apparatus, the CellQuest software was used to acquire and analyze the data (Becton Dickinson biosciences, Heidelberg). FACS staining and measuring of the fluorescence intensity were performed as described in Current Protocols in Immunology (Coligan, Kruisbeek, Margulies, Shevach and Strober, Wiley-Interscience, 2002).

[0765] Expression of the Flag tagged recombinant transmembrane fusion proteins consisting of cynomolgus EpCAM and the 1-27 N-terminal amino acids of the human, marmoset, tamarin, squirrel monkey and swine CD3 epsilon chain respectively on transfected cells is clearly detectable (FIG. 36).

### 19.2 Cloning and Expression of the Cross-Species Specific Anti-CD3 Single Chain Antibody I2C HL in Form of an IgG1 Antibody

[0766] In order to provide improved means of detection of binding of the cross-species specific single chain anti-CD3 antibody the I2C VHVL specificity is converted into an IgG1 antibody with murine IgG1 and murine kappa constant regions. cDNA sequences coding for the heavy chain of the IgG antibody were obtained by gene synthesis according to standard protocols. The gene synthesis fragments were designed as to contain first a Kozak site to allow for eukaryotic expression of the construct, which is followed by an 19 amino acid immunoglobulin leader peptide, which is followed in frame by the coding sequence of the heavy chain variable region or light chain variable region, followed in frame by the coding sequence of the heavy chain constant region of murine IgG1 as published in GenBank (Accession number AB097849) or the coding sequence of the murine kappa light chain constant region as published in GenBank (Accession number D14630), respectively.

[0767] Restriction sites were introduced at the beginning and the end of the cDNA coding for the fusion protein. Restriction sites EcoRI at the 5′ end and SalI at the 3′ end were used for the following cloning procedures. The gene synthesis fragments were cloned via EcoRI and SalI into a plasmid designated pEF-DHFR (pEF-DHFR is described in Raum et al. Cancer Immunol Immunother 50 (2001) 141-150) for the heavy chain construct and pEFADA (pEFADA is described in Raum et al. loc cit.) for the light chain construct according to standard protocols. Sequence verified plasmids were used for co-transfection of respective light and heavy chain constructs into DHFR deficient CHO cells for eukaryotic expression of the construct. Eukaryotic protein expression in DHFR deficient CHO cells was performed as described by Kaufmann R. J. (1990) loc cit. Gene amplification of the constructs was induced by increasing concentrations of methotrexate (MTX) to a final concentration of up to 20 nM MTX and deoxycoformycin (dCF) to a final concentration of up to 300 nM dCF. After two passages of stationary culture cell culture supernatant was collected and used in the subsequent experiment.

### 19.3 Binding of the Cross-Species Specific Anti-CD3 Single Chain Antibody I2C HL in Form of an IgG1 Antibody to 1-27 CD3-EpCAM

[0768] Binding of the generated I2C IgG1 construct to the 1-27 N-terminal amino acids of the human, marmoset, tamarin and squirrel monkey CD3 epsilon chains respectively fused to cynomolgus Ep-CAM as described in Example 19.1 was tested in a FAGS assay according to standard protocols. For that purpose a number of 2.5×10⁵ cells were incubated with 50 μl of cell culture supernatant containing the I2C IgG1 construct as described in Example 19.2. The binding of the antibody was detected with an R-Phycoerythrin-conjugated affinity purified F(ab′)2 fragment, goat anti-mouse IgG, Fc-gamma fragment specific, diluted 1:100 in PBS with 2% FCS (Jackson ImmunoResearch Europe Ltd., Newmarket, Suffolk, UK). Flow cytometry was performed on a FACS-Calibur apparatus, the CellQuest software was used to acquire and analyze the data (Becton Dickinson biosciences, Heidelberg). FAGS staining and measuring of the fluorescence intensity were performed as described in Current Protocols in Immunology (Coligan, Kruisbeek, Margulies, Shevach and Strober, Wiley-Interscience, 2002).

[0769] As shown in FIG. 37 binding of the I2C IgG1 construct to the transfectants expressing the recombinant transmembrane fusion proteins consisting of the 1-27 N-terminal amino acids of CD3 epsilon of human, marmoset, tamarin or squirrel monkey fused to cynomolgus EpCAM as compared to the negative control consisting of the 1-27 N-terminal amino acids of CD3 epsilon of swine fused to cynomolgus EpCAM was observed. Thus multi-primate cross-species specificity of I2C was demonstrated. Signals obtained with the anti Flag M2 antibody and the I2C IgG1 construct were comparable, indicating a strong binding activity of the cross-species specific specificity I2C to the N-terminal amino acids 1-27 of CD3 epsilon.

20. Binding of the Cross-Species Specific Anti-CD3 Binding Molecule I2C to the Human CD3 Epsilon Chain with and without N-Terminal His6 Tag

[0770] A chimeric IgG1 antibody with the binding specificity I2C as described in Example 19.2 specific for CD3 epsilon was tested for binding to human CD3 epsilon with and without N-terminal His6 tag. Binding of the antibody to the EL4 cell lines transfected with His6-human CD3 epsilon as described in Example 6.1 and wild-type human CD3 epsilon as described in Example 5.1 respectively was tested by a FACS assay according to standard protocols. 2.5×10⁵ cells of the transfectants were incubated with 50 μl of cell culture supernatant containing the I2C IgG1 construct or 50 μl of the respective control antibodies at 5 μg/ml in PBS with 2% FCS. As negative control an appropriate isotype control and as positive control for expression of the constructs the CD3 specific antibody UCHT-1 were used respectively. Detection of the His6 tag was performed with the penta His antibody (Qiagen). The binding of the antibodies was detected with a R-Phycoerythrin-conjugated affinity purified F(ab′)2 fragment, goat anti-mouse IgG, Fc-gamma fragment specific, diluted 1:100 in PBS with 2% FCS (Jackson ImmunoResearch Europe Ltd., Newmarket, Suffolk, UK). Flow cytometry was performed on a FACS-Calibur apparatus, the CellQuest software was used to acquire and analyze the data (Becton Dickinson biosciences, Heidelberg). FACS staining and measuring of the fluorescence intensity were performed as described in Current Protocols in Immunology (Coligan, Kruisbeek, Margulies, Shevach and Strober, Wiley-Interscience, 2002).

[0771] Comparable binding of the anti-human CD3 antibody UCHT-1 to both transfectants demonstrates approximately equal levels of expression of the constructs. The binding of the penta His antibody confirmed the presence of the His6 tag on the His6-human CD3 construct but not on the wild-type construct.

[0772] Compared to the EL4 cell line transfected with wild-type human CD3 epsilon a clear loss of binding of the I2C IgG1 construct to human-CD3 epsilon with an N-terminal His6 tag was detected. These results show that a free N-terminus of CD3 epsilon is essential for binding of the cross-species specific anti-CD3 binding specificity I2C to the human CD3 epsilon chain (FIG. 28).

### 21. Generation of CD33 and CD3 Cross-Species Specific Bispecific Single Chain Molecules

### 21.1 Generation of CD33 and CD3 Cross-Species Specific Bispecific Single Chain Molecules

[0773] Generally, bispecific single chain antibody molecules, each comprising a domain with a binding specificity cross-species specific for human and macaque CD3epsilon as well as a domain with a binding specificity cross-species specific for human and macaque CD33, were designed as set out in the following Table 6:

TABLE 6
Formats of anti-CD3 and anti-CD33 cross-species
specific bispecific single chain antibody molecules

| SEQ ID | Formats of protein constructs |
|---|---|
| (nucl/prot) | (N → C) |
| 316/315 | I2CHLxAF5HL |
| 314/313 | F12QHLxAF5HL |
| 312/311 | H2CHLxAF5HL |

[0774] The aforementioned constructs containing the variable light-chain (L) and variable heavy-chain (H) domains cross-species specific for human and macaque CD33 and the CD3 specific VH and VL combinations cross-species specific for human and macaque CD3 were obtained by gene synthesis. The gene synthesis fragments were designed in analogy to the procedure described in example 9 for the MCSP and CD3 cross-species specific single chain molecules. A clone with sequence-verified nucleotide sequence was transfected into DHFR deficient CHO cells for eukaryotic expression of the construct. Eukaryotic protein expression in DHFR deficient CHO cells was performed as also described in example 9 for the MCSP and CD3 cross-species specific single chain molecules and used in the subsequent experiments.

### 21.2 Flow Cytometric Binding Analysis of the CD33 and CD3 Cross-Species Specific Bispecific Antibodies

[0775] In order to test the functionality of the cross-species specific bispecific antibody constructs regarding the capability to bind to human and macaque CD33 and CD3, respectively, a FACS analysis is performed similar to the analysis described for the analysis of the MCSP and CD3 cross-species specific bispecific antibodies in example 10 using CHO cells expressing the human or macyque CD33 extracellular domains (see examples 16.1 and 16.2).

[0776] The bispecific binding of the single chain molecules listed above, which were cross-species specific for CD33 and cross-species specific for human and non-chimpanzee primate CD3 was clearly detectable as shown in FIG. 41. In the FACS analysis all constructs showed binding to CD3 and CD33 as compared to the respective negative controls. Cross-species specificity of the bispecific antibodies to human and macaque CD3 and CD33 antigens was demonstrated.

### 21.3. Bioactivity of CD33 and CD3 Cross-Species Specific Bispecific Single Chain Antibodies

[0777] Bioactivity of the generated bispecific single chain antibodies was analyzed by chromium 51 (⁵¹Cr) release in vitro cytotoxicity assays using the CD33 positive cell lines described in Examples 16.1 and 16.2. As effector cells stimulated human CD4/CD56 depleted PBMC or the macaque T cell line 4119LnPx were used as specified in the respective figures. The cytotoxicity assays were performed similar to the procedure described for the bioactivity analysis of the MCSP and CD3 cross-species specific bispecific antibodies in example 11 using CHO cells expressing the human or macaque CD33 extracellular domains (see example 16.1 and 16.2) as target cells.

[0778] As shown in FIG. 42, all of the generated cross-species specific bispecific single chain antibody constructs demonstrate cytotoxic activity against human CD33 positive target cells elicited by stimulated human CD4/CD56 depleted PBMC and against macaque CD33 positive target cells elicited by the macaque T cell line 4119LnPx.

22. Redistribution of Circulating Chimpanzee T Cells Upon Exposure to a Conventional Bispecific CD3 Binding Molecule Directed at a Target Molecule which is Absent from Circulating Blood Cells

[0779] A single male chimpanzee was subjected to dose escalation with intravenous single-chain EpCAM/CD3-bispecific antibody construct (Schlereth (2005) Cancer Res 65: 2882). Like in the conventional single-chain CD19/CD3-bispecific antibody construct (Loffler (2000, Blood, Volume 95, Number 6) or WO 99/54440), the CD3 arm of said EpCAM/CD3-construct is also directed against a conventional context dependent epitope of human and chimpanzee CD3. At day 0, the animal received 50 ml PBS/5% HSA without test material, followed by 50 ml PBS/5% HSA plus single-chain EpCAM/CD3-bispecific antibody construct at 1.6, 2.0, 3.0 and 4.5 μg/kg on days 7, 14, 21 and 28, respectively. The infusion period was 2 hours per administration. For each weekly infusion the chimpanzee was sedated with 2-3 mg/kg Telazol intramuscularly, intubated and placed on isoflurane/O₂ anesthesia with stable mean blood pressures. A second intravenous catheter was placed in an opposite limb to collect (heparinized) whole blood samples at the time points indicated in FIG. 43 for FAGS analysis of circulating blood cells. After standard erythrocyte lysis, T cells were stained with a FITC-labeled antibody reacting with chimpanzee CD2 (Becton Dickinson) and the percentage of T cells per total lymphocytes determined by flowcytometry. As shown in FIG. 43, every administration of single-chain EpCAM/CD3-bispecific antibody construct induced a rapid drop of circulating T cells as observed with single-chain CD19/CD3-bispecific antibody construct in B-NHL patients, who had essentially no circulating target B (lymphoma) cells. As there are no EpCAM-positive target cells in the circulating blood of humans and chimpanzees, the drop of circulating T cells upon exposure to the single-chain EpCAM/CD3-bispecific antibody construct can be attributed solely to a signal, which the T cells receive through pure interaction of the CD3 arm of the construct with a conventional context dependent CD3 epitope in the absence of any target cell mediated crosslinking. Like the redistribution of T cells induced through their exposure to single-chain CD19/CD3-bispecific antibody construct in B-NHL patients, who had essentially no circulating target B (lymphoma) cells, the T cell redistribution in the chimpanzee upon exposure to the single-chain EpCAM/CD3-bispecific antibody construct can be explained by a conformational change of CD3 following the binding event to a context dependent CD3 epitope further resulting in the transient increase of T cell adhesiveness to blood vessel endothelium (see Example 13). This finding confirms, that conventional CD3 binding molecules directed to context dependent CD3 epitopes—solely through this interaction—can lead to a redistribution pattern of peripheral blood T cells, which is associated with the risk of CNS adverse events in humans as describe in Example 13.

23. Specific Binding of scFv Clones to the N-Terminus of Human CD3 Epsilon
23.1 Bacterial Expression of scFv Constructs in E. coli XL1 Blue

[0780] As previously mentioned, E. coli XL1 Blue transformed with pComb3H5Bhis/Flag containing a VL- and VH-segment produce soluble scFv in sufficient amounts after excision of the gene Ill fragment and induction with 1 mM IPTG. The scFv-chain is exported into the periplasma where it folds into a functional conformation.

[0781] The following scFv clones were chosen for this experiment:

i) ScFvs 4-10, 3-106, 3-114, 3-148, 4-48, 3-190 and 3-271 as described in WO 2004/106380.
ii) ScFvs from the human anti-CD3epsilon binding clones H2C, F12Q and I2C as described herein.

[0782] For periplasmic preparations, bacterial cells transformed with the respective scFv containing plasmids allowing for periplasmic expression were grown in SB-medium supplemented with 20 mM MgCl₂ and carbenicillin 50 μg/ml and redissolved in PBS after harvesting. By four rounds of freezing at −70° C. and thawing at 37° C., the outer membrane of the bacteria was destroyed by osmotic shock and the soluble periplasmic proteins including the scFvs were released into the supernatant. After elimination of intact cells and cell-debris by centrifugation, the supernatant containing the human anti-human CD3-scFvs was collected and used for further examination. These crude supernatants containing scFv will be further termed periplasmic preparations (PPP).

23.2 Binding of scFvs to Human CD3 Epsilon (Aa 1-27)-Fc Fusion Protein

[0783] ELISA experiments were carried out by coating the human CD3 epsilon (aa 1-27)-Fc fusion protein to the wells of 96 well plastic plates (Nunc, maxisorb) typically at 4° C. over night. The antigen coating solution was then removed, wells washed once with PBS/0.05% Tween 20 and subsequently blocked with PBS/3% BSA for at least one hour. After removal of the blocking solution, PPPs and control solutions were added to the wells and incubated for typically one hour at room temperature. The wells were then washed three times with PBS/0.05% Tween 20. Detection of scFvs bound to immobilized antigen was carried out using a Biotin-labeled anti FLAG-tag antibody (M2 anti Flag-Bio, Sigma, typically at a final concentration of 1 μg/ml PBS) and detected with a peroxidase-labeled Streptavidine (Dianova, 1 μg/ml PBS). The signal was developed by adding ABTS substrate solution and measured at a wavelength of 405 nm. Unspecific binding of the test-samples to the blocking agent and/or the human IgG1 portion of the human CD3 epsilon (aa 1-27)-Fc fusion protein was examined by carrying out the identical assay with the identical reagents and identical timing on ELISA plates which were coated with human IgG1 (Sigma). PBS was used as a negative control.

[0784] As shown in FIG. 44, scFvs H2C, F12Q and I2C show strong binding signals on human CD3 epsilon (aa 1-27)-Fc fusion protein. The human scFvs 3-106, 3-114, 3-148, 3-190, 3-271, 4-10 and 4-48 (as described in WO 2004/106380) do not show any significant binding above negative control level.

[0785] To exclude the possibility that the positive binding of scFvs H2C, F12Q and I2C to wells coated with human CD3 epsilon (aa 1-27)-Fc fusion protein might be due to binding to BSA (used as a blocking agent) and/or the human IgG1 Fc-gamma-portion of the human CD3 epsilon (aa 1-27)-Fc fusion protein, a second ELISA experiment was performed in parallel. In this second ELISA experiment, all parameters were identical to those in the first ELISA experiment, except that in the second ELISA experiment human IgG1 (Sigma) was coated instead of human CD3 epsilon (aa 1-27)-Fc fusion protein. As shown in FIG. 45, none of the scFvs tested showed any significant binding to BSA and/or human IgG1 above background level.

[0786] Taken together, these results allow the conclusion that conventional CD3 binding molecules recognizing a context-dependent epitope of CD3 epsilon (e.g. as disclosed in WO 2004/106380) do not bind specifically to the human CD3 epsilon (aa 1-27)-region, whereas the scFvs H2C, F12Q and I2C binding a context-independent epitope of CD3 epsilon clearly show specific binding to the N-terminal 27 amino acids of human CD3 epsilon.

### 24. Generation and Characterization of PSCA and CD3 Cross-Species Specific Bispecific Single Chain Antibody Molecules

### 24.1 Generation of CHO Cells Expressing Human PSCA

[0787] The coding sequence of human PSCA as published in GenBank (Accession number NM_005672) was obtained by gene synthesis according to standard protocols. The gene synthesis fragment was designed as to contain first a Kozak site for eukaryotic expression of the construct, followed by a 19 amino acid immunoglobulin leader peptide, followed in frame by the coding sequence of a FLAG tag, followed in frame by the coding sequence of the mature human PSCA protein and a stop codon (the corresponding sequences of the construct are listed under SEQ ID NOs. 443 and 444). The gene synthesis fragment was also designed as to introduce restriction sites at the beginning and at the end of the fragment. The introduced restriction sites, EcoRI at the 5′ end and SalI at the 3′ end, were utilised in the following cloning procedures. The gene synthesis fragment was cloned via EcoRI and SalI into a plasmid designated pEF-DHFR (pEF-DHFR is described in Raum et al. Cancer Immunol Immunother 50 (2001) 141-150) following standard protocols. The aforementioned procedures were carried out according to standard protocols (Sambrook, Molecular Cloning; A Laboratory Manual, 3rd edition, Cold Spring Harbour Laboratory Press, Cold Spring Harbour, New York (2001)). A clone with sequence-verified nucleotide sequence was transfected into DHFR deficient CHO cells for eukaryotic expression of the construct. Eukaryotic protein expression in DHFR deficient CHO cells was performed as described by Kaufmann R. J. (1990) Methods Enzymol. 185, 537-566. Gene amplification of the construct was induced by increasing concentrations of methotrexate (MTX) to a final concentration of up to 20 nM MTX.

### 24.2 Generation of CHO Cells Expressing Macaque PSCA

[0788] The cDNA sequence of macaque PSCA was obtained by a PCR on cDNA from macaque monkey (cynomolgus) prostate prepared according to standard protocols. The following reaction conditions: 1 cycle at 94° C. for 2 minutes followed by 40 cycles with 94′C for 1 minute, 55′C for 1 minute and 72′C for 1 minute followed by a terminal cycle of 72″C for 3 minutes and the following primers were used:

forward primer:
(SEQ ID NO. 447)
5′-CACCACAGCCCACCAGTGACC-3′
reverse primer:
(SEQ ID NO. 448)
5′-GAGGCCTGGGGCACCACACCC-3′

[0789] The PCR reactions were performed under addition of PCR grade betain to a final concentration of 1 M. This PCR generated a DNA fragment, which was isolated and sequenced according to standard protocols using the PCR primers, and thereby provided the cDNA sequence coding macaque PSCA. To generate a construct for expression of macaque PSCA a cDNA fragment was obtained by gene synthesis according to standard protocols (the corresponding sequences are listed under SEQ ID NOs: 445 and 446). The gene synthesis fragment was designed as to contain first a Kozak site for eukaryotic expression of the construct, followed by a 19 amino acid immunoglobulin leader peptide, followed in frame by the coding sequence of a FLAG tag, followed in frame by the coding sequence of the mature macaque PSCA protein and a stop codon. The gene synthesis fragment was also designed as to introduce restriction sites at the beginning and at the end of the fragment. The introduced restriction sites, EcoRI at the 5′ end and SalI at the 3′ end, were utilised in the following cloning procedures. The gene synthesis fragment was cloned via EcoRI and SalI into a plasmid designated pEF-DHFR (pEF-DHFR is described in Raum et al. Cancer Immunol Immunother 50 (2001) 141-150) following standard protocols. The aforementioned procedures were carried out according to standard protocols (Sambrook, Molecular Cloning; A Laboratory Manual, 3rd edition, Cold Spring Harbour Laboratory Press, Cold Spring Harbour, New York (2001)). A clone with sequence-verified nucleotide sequence was transfected into DHFR deficient CHO cells for eukaryotic expression of the construct. Eukaryotic protein expression in DHFR deficient CHO cells was performed as described by Kaufmann R. J. (1990) Methods Enzymol. 185, 537-566. Gene amplification of the construct was induced by increasing concentrations of methotrexate (MTX) to a final concentration of up to 20 nM MTX.

### 24.3 Generation of PSCA and CD3 Cross-Species Specific Bispecific Single Chain Antibody Molecules

### Cloning of Cross-Species Specific PSCA×CD3 Bispecific Single Chain Antibody Molecules

[0790] Generally, bispecific single chain antibody molecules, each comprising a domain with a binding specificity cross-species specific for human and non-chimpanzee primate CD3 epsilon as well as a domain with a binding specificity cross-species specific for human and non-chimpanzee primate PSCA, were designed as set out in the following Table 7:

TABLE 7
Formats of anti-CD3 and anti-PSCA cross-species
specific bispecific single chain antibody molecules

| SEQ ID | |
|---|---|
| NO. | Formats of protein constructs |
| (nucl/prot) | (N → C) |
| 390/389 | PSCA1HLxI2CHL |
| 422/421 | PSCA3HLxI2CHL |
| 440/439 | PSCA4HLxI2CHL |
| 392/391 | PSCA1LHxI2CHL |
| 406/405 | PSCA2LHxI2CHL |
| 424/423 | PSCA3LHxI2CHL |
| 442/441 | PSCA4LHxI2CHL |
| 1227/1226 | PC16E12HLxI2CHL |
| 1199/1198 | PC32D5HLxI2CHL |
| 1185/1184 | PC32B8HLxI2CHL |
| 1241/1240 | PC08F4HLxI2CHL |
| 1213/1212 | PC17D10HLxI2CHL |
| 1269/1268 | PC17H10HLxI2CHL |
| 1255/1254 | PC16F5HLxI2CHL |

[0791] The aforementioned constructs containing the variable light-chain (L) and variable heavy-chain (H) domains cross-species specific for human and macaque PSCA and the CD3 specific VH and VL combinations cross-species specific for human and macaque CD3 were obtained by gene synthesis. The gene synthesis fragments were designed and eukaryotic protein expression was performed in analogy to the procedure described in example 9 for the MCSP and CD3 cross-species specific single chain molecules.

### 24.4 Expression and Purification of the PSCA×CD3 Bispecific Single Chain Antibody Molecules

[0792] The bispecific single chain antibody molecules were expressed in Chinese hamster ovary cells (CHO) or HEK293 cells as described herein above for the MCSP×CD3 bispecific single chain antibodies.

[0793] The isolation and analysis of the expressed bispecific single chain antibodies has also been described herein above in Example 9.

### 24.5 Flow Cytometric Binding Analysis of the PSCA and CD3 Cross-Species Specific Bispecific Antibodies

[0794] In order to test the functionality of the cross-species specific bispecific antibody constructs regarding the capability to bind to human and macaque PSCA and CD3, respectively, a FACS analysis was performed. For this purpose CHO cells transfected with human PSCA as described in Example 24.1 and the human CD3 positive T cell leukemia cell line HPB-ALL (DSMZ, Braunschweig, ACC483) were used to test the binding to human antigens. The binding reactivity to macaque antigens was tested by using the generated macaque PSCA transfectant described in Example 24.2 and a macaque T cell line 4119LnPx (kindly provided by Prof Fickenscher, Hygiene Institute, Virology, Erlangen-Nuernberg; published in Knappe A, et al., and Fickenscher H., Blood 2000, 95, 3256-61). 200.000 cells of the respective cell lines were incubated for 30 min on ice with 50 μl of cell culture supernatant of transfected cells expressing the cross-species specific bispecific antibody constructs. The cells were washed twice in PBS with 2% FCS and binding of the construct was detected with a murine Penta His antibody (Qiagen; diluted 1:20 in 50 μl PBS with 2% FCS). After washing, bound anti His antibodies were detected with an Fc gamma-specific antibody (Dianova) conjugated to phycoerythrin, diluted 1:100 in PBS with 2% FCS. Supernatant of untransfected cells was used as a negative control.

[0795] Flow cytometry was performed on a FACS-Calibur apparatus, the CellQuest software was used to acquire and analyze the data (Becton Dickinson biosciences, Heidelberg). FAGS staining and measuring of the fluorescence intensity were performed as described in Current Protocols in Immunology (Coligan, Kruisbeek, Margulies, Shevach and Strober, Wiley-Interscience, 2002).

[0796] The bispecific binding of the single chain molecules listed above, which are cross-species specific for PSCA and CD3 was clearly detectable as shown in FIGS. 46 and 48. In the FACS analysis all constructs showed binding to CD3 and PSCA compared to the negative control. Cross-species specificity of the bispecific antibodies to human and macaque CD3 and PSCA antigens, respectively, was demonstrated.

### 24.6 Bioactivity of PSCA and CD3 Cross-Species Specific Bispecific Single Chain Antibodies

[0797] Bioactivity of the generated bispecific single chain antibodies was analyzed by chromium 51 (⁵¹Cr) release in vitro cytotoxicity assays using the CHO cells transfected with human PSCA described in Example 24.1 and the CHO cells transfected with macaque PSCA described in Example 24.2. As effector cells stimulated human CD4/CD56 depleted PBMC or the macaque T cell line 4119LnPx were used, respectively.

[0798] The generation of stimulated human PBMC was described herein above in Example Target cells were prepared and the assay was performed in analogy to the procedure described for the MCSP×CD3 bispecific single chain antibodies in example 11.

[0799] As shown in FIGS. 47 and 49 all of the generated cross-species specific bispecific single chain antibody constructs demonstrated cytotoxic activity against human PSCA positive target cells elicited by stimulated human CD4/CD56 depleted PBMC and macaque PSCA positive target cells elicited by the macaque T cell line 4119LnPx.

### 24.7 Bispecific Single Chain Antibody Constructs Directed Against Human and Non-Chimpanzee Primate CD3 and PSCA

[0800] The human antibody germline VH sequence VH11-f (http://vbase.mrc-cpe.cam.ac.uk/) is chosen as framework context for CDRH1 (SEQ ID NO. 414), CDRH2 (SEQ ID NO. 415) and CDRH3 (SEQ ID NO. 416). Likewise the same human antibody germline VH sequence is chosen as framework context for CDRH1 (SEQ ID NO. 400), CDRH2 (SEQ ID NO. 401) and CDRH3 (SEQ ID NO. 402). For each human VH several degenerated oligonucleotides have to be synthesized that overlap in a terminal stretch of approximately 15-20 nucleotides. To this end every second primer is an antisense primer. For VH1 1-f the following set of oligonucleotides is used:

5′ P3-VH-A-Xhol
(SEQ ID NO. 449)
CCT GAT CTC GAG AGC GGC SCA GAS STG RAA AAG CCA
GGC GCC ACG GTG AAG ATT
5′ P3-VH-B
(SEQ ID NO. 450)
GGC GCC ACG GTG AAG ATT TCC TGC AAG SYC AGC GGC
WAC ACG TTC ACC GGC TAC TAC ATC CAC TGG GTG
3′ P3-VH-C
(SEQ ID NO. 451)
GTA GGA GGT GAA GCC GTT GTT GGG GTC CAC TCT GCC
SAT CCA TTC CAG GCY CTT CCC GKG GGM CTG TTK CAC
CCA GTG GAT GTA GTA
5′ P3-VH-D
(SEQ ID NO. 452)
AAC GGC TTC ACC TCC TAC AAC CAG AAG TTC AAG GGC
ARG GYC AYA MTK ACC GYG GAC AMG AGC ACC RRC ACC
GCC TAC ATG GAA CTG
3′ P3-VH-E
(SEQ ID NO. 453)
GCT GTC GAA GAA GTT GCC CRC GCA ATA GTA CAC GGC
GGT GTC CTC GCT GSK CAG GCT KCT CAG TTC CAT GTA
GGC GGT
3′ P3-VH-F-BstEII
(SEQ ID NO. 454)
CAC GTC GGT GAC CGT GGT TCC CTG GCC CCA GCT GTC
GAA GAA GTT GCC

[0801] As another set of oligonucleotides for VH1 1-f the following primers are used:

5′-PSCA2VH-A-XHO1
(SEQ ID NO. 455)
CAG GTG CTCGAG YCA GGC GCC GAA STG RWG AAG CCT
GGC GCC MCA GTG AAG MTA TCC TGC AAG GYC AGC GGC
TAC ACC TTC ACC AAC
3′-PSCA2VH-B
(SEQ ID NO. 456)
GCT GTC GCT GGG GTC GAT CCT GCC YAT CCA TTC CAG
GCC CYT GCC GGG CSY CTG TTK CAC CCA GTT CAG CCA
GTA GTT GGT GAA GGT GTA GCC
5′-PSCA2VH-C
(SEQ ID NO. 457)
AGG ATC GAC CCC AGC GAC AGC GAG ATC CAC TAC GAC
CAG AAG TTC AAG GAC ARA GYC ACC MTA ACC GYG GAC
AMG AGC ACC RRC ACC GCC TAC
3′-PSCA2VH-D
(SEQ ID NO. 458)
GGC CAG GGC GCA ATA GTA CAC GGC GGT GTC CTC GCT
TST CAG GCT GGA CAG CTS SAT GTA GGC GGT GYY GGT
GCT C
3′-PSCA2VH-E-BSTE2
(SEQ ID NO. 459)
AGA CAC GGT GAC CGT GGT GCC CTG GCC CCA GTA GGC
CAT GGC GTA GAT GCC GGT CAG GGC GCA ATA GTA CAC

[0802] Each of these primer sets spans over the whole corresponding VH sequence. Within each set primers are mixed in equal amounts (e.g. 1 μl of each primer (primer stocks 20 to 100 μM) to a 20 μl PCR reaction) and added to a PCR mix consisting of PCR buffer, nucleotides and Taq polymerase. This mix is incubated at 94° C. for 3 minutes, 65° C. for 1 minute, 62° C. for 1 minute, 59° C. for 1 minute, 56° C. for 1 minute, 52° C. for 1 minute, 50° C. for 1 minute and at 72° C. for 10 minutes in a PCR cycler. Subsequently the product is run in an agarose gel electrophoresis and the product of a size from 200 to 400 isolated from the gel according to standard methods.

[0803] Each VH PCR product is then used as a template for a standard PCR reaction using primers that incorporate N-terminal and C-terminal suitable cloning restriction sites. The DNA fragment of the correct size (for a VH approximately 350 nucleotides) is isolated by agarose gel electrophoresis according to standard methods. In this way sufficient VH DNA fragment is amplified.

[0804] The human antibody germline VL sequence VkII A1 (http://vbase.mrc-cpe.cam.ac.uk/) is chosen as framework context for CDRL1 (SEQ ID NO. 409), CDRL2 (SEQ ID NO. 410) and CDRL3 (SEQ ID NO. 411). Likewise human antibody germline VL sequence VkII A19 (http://vbase.mrc-cpe.cam.ac.uk/) is chosen as framework context for CDRL1 (SEQ ID NO. 395), CDRL2 (SEQ ID NO. 396) and CDRL3 (SEQ ID NO. 397). For each human VL several degenerated oligonucleotides have to be synthesized that overlap in a terminal stretch of approximately 15-20 nucleotides. To this end every second primer is an antisense primer. Restriction sites needed for later cloning within the oligonucleotides are deleted. For VkII A1 the following oligonucleotides are used:

5′ P3-VL-A-Sacl
(SEQ ID NO. 460)
CCT GTA GAG CTC GTC ATG ACC CAG TCC CCC CTG TCC
CTG MSC GTG ACC MTC GGC CAG CCA GCC AGC ATC
3′ P3-VL-B
(SEQ ID NO. 461)
CCA GTT CAG GTA GGT CTT GCC GTC GCT GTC CAG CAG
GGA CTG GCT GGA CTT GCA AGA GAT GCT GGC TGG CTG
GCC
5′ P3-VL-C
(SEQ ID NO. 462)
AAG ACC TAC CTG AAC TGG YTS CWG CAG AGG CCA GGC
CAG AGC CCC ARG AGG CTG ATC TAC CTG GTG TCC ACC
CTG
3′ P3-VL-D
(SEQ ID NO. 463)
GGT GAA GTC GGT GCC GGA GCC GCT GCC GGA GAA TCT
GTC TGG CAC GCC GCT GTC CAG GGT GGA CAC CAG GTA
5′ P3-VL-E
(SEQ ID NO. 464)
TCC GGC ACC GAC TTC ACC CTG AAG ATC AGC AGG GTG
GAG GCC GAG GAC STG GGC GTG TAC TAC TGC TGG CAG
GGC ACC
3′ P3-VL-F-BsiWl/Spel
(SEQ ID NO. 465)
CCA GAC ACT AGT CGT ACG CTT GAT TTC CAG CTT GGT
CCC TCC GCC GAA GGT CCT TGG GAA GTG GGT GCC CTG
CCA GCA GTA

[0805] For VkII A19 the oligonucleotides are as follows:

5′-PSCA2VL-a-SAC1
(SEQ ID NO: 466)
CAG ACA GAG CTC GTG ATG ACC CAG KCA SCT CYA AGC
STG CCA GTG ACC CCA GGC GAG YCA GYG TCC ATC AGC
TGC AGG TCC AGC
3′-PSCA2VL-b
(SEQ ID NO. 467)
CTG GGG GCT CTG GCC TGG CYT CTG CAG AWA CCA GTA
CAG GTA GGT GTT GCC GTT GCT GTG CAG CAG GCT CTT
GCT GGA CCT GCA GCT GAT G
5′-PSCA2VL-c
(SEQ ID NO. 468)
CCA GGC CAG AGC CCC CAG CTG CTG ATC TAC AGG ATG
AGC AAC CTG GCT AGC GGG GTG CCA GAC AGA TTC AGC
GGC AGC GGC TCT GGA ACC
3′-PSCA2VL-d
(SEQ ID NO. 469)
CAG GCA GTA GTA CAC GCC CAC GTC CTC GGC CTC CAC
CCT GCT GAT CYT CAG GGT GAA GKC GGT TCC AGA GCC
GCT GCC
3′-PSCA2VL-e-BsiW1-Spe1
(SEQ ID NO: 470)
GTG CTG ACT AGT CGT ACG CTT GAT TTC CAG CTT GGT
CCC TTG GCC GAA GGT GTA GGG GTA TTC CAG GTG CTG
CAG GCA GTA GTA CAC GCC

[0806] Each of these primer sets spans over the whole corresponding VL sequence.

[0807] Within each set primers are mixed in equal amounts (e.g. 1 μl of each primer (primer stocks 20 to 100 μM) to a 20 μl PCR reaction) and added to a PCR mix consisting of PCR buffer, nucleotides and Taq polymerase. This mix is incubated at 94° C. for 3 minutes, 65° C. for 1 minute, 62° C. for 1 minute, 59° C. for 1 minute, 56° C. for 1 minute, 52° C. for 1 minute, 50° C. for 1 minute and at 72° C. for 10 minutes in a PCR cycler. Subsequently the product is run in an agarose gel electrophoresis and the product of a size from 200 to 400 isolated from the gel according to standard methods.

[0808] Each VL PCR product is then used as a template for a standard PCR reaction using primers that incorporate N-terminal and C-terminal suitable cloning restriction sites. The DNA fragment of the correct size (for a VL approximately 330 nucleotides) is isolated by agarose gel electrophoresis according to standard methods. In this way sufficient VL DNA fragment is amplified.

[0809] The final VH1 1-f (P3)-based VH PCR product (i.e. the repertoire of human/humanized VH) is then combined with the final VkII A1-based VL PCR product (i.e. the repertoire of human/humanized VL) and the final VH1 1-f (PSCA2)-based VH PCR product (i.e. the repertoire of human/humanized VH) with the final VkII A19-based VL PCR product (i.e. the repertoire of human/humanized VL) in the phage display vector pComb3H5Bhis to form two different libraries of functional scFvs from which—after display on filamentous phage—anti-PSCA binders are selected, screened, identified and confirmed as described as follows:

[0810] 450 ng of the light chain fragments (SacI-SpeI digested) are ligated with 1400 ng of the phagemid pComb3H5Bhis (SacI-SpeI digested; large fragment). The resulting combinatorial antibody library is then transformed into 300 ul of electrocompetent Escherichia coli XL1 Blue cells by electroporation (2.5 kV, 0.2 cm gap cuvette, 25 uFD, 200 Ohm, Biorad gene-pulser) resulting in a library size of more than 10⁷ independent clones. After one hour of phenotype expression, positive transformants are selected for carbenicilline resistance encoded by the pComb3H5BHis vector in 100 ml of liquid super broth (SB)-culture over night. Cells are then harvested by centrifugation and plasmid preparation is carried out using a commercially available plasmid preparation kit (Qiagen).

[0811] 2800 ng of this plasmid-DNA containing the VL-library (XhoI-BstEII digested; large fragment) are ligated with 900 ng of the heavy chain V-fragments (XhoI-BstEII digested) and again transformed into two 300 ul aliquots of electrocompetent E. coli XL1 Blue cells by electroporation (2.5 kV, 0.2 cm gap cuvette, 25 uFD, 200 Ohm) resulting in a total VH-VL scFv (single chain variable fragment) library size of more than 10⁷ independent clones.

[0812] After phenotype expression and slow adaptation to carbenicillin, the E. coli cells containing the antibody library are transferred into SB-Carbenicillin (50 ug/mL) selection medium. The E. coli cells containing the antibody library is then infected with an infectious dose of 10¹² particles of helper phage VCSM13 resulting in the production and secretion of filamentous M13 phage, wherein phage particle contains single stranded pComb3H5BHis-DNA encoding a scFv-fragment and displayed the corresponding scFv-protein as a translational fusion to phage coat protein III. This pool of phages displaying the antibody library is used for the selection of antigen binding entities.

[0813] For this purpose the phage library carrying the cloned scFv-repertoire is harvested from the respective culture supernatant by PEG8000/NaCl precipitation and centrifugation. Approximately 10¹¹ to 10¹² scFv phage particles are resuspended in 0.4 ml of PBS/0.1% BSA and incubated with 10⁵ to 10⁷ PSCA transfected CHO cells (see example 24.1) for 1 hour on ice under slow agitation. These PSCA transfected CHO cells are harvested beforehand by centrifugation, washed in PBS and resuspended in PBS/1% FCS (containing Na Azide). scFv phage which do not specifically bind to the PSCA transfected CHO cells are eliminated by up to five washing steps with PBS/1% FCS (containing Na Azide). After washing, binding entities are eluted from the cells by resuspending the cells in HCl-glycine pH 2.2 (10 min incubation with subsequent vortexing) and after neutralization with 2 M Tris pH 12, the eluate is used for infection of a fresh uninfected E. coli XL1 Blue culture (OD600>0.5). The E. coli culture containing E. coli cells successfully transduced with a phagemid copy, encoding a human/humanized scFv-fragment, are again selected for carbenicillin resistance and subsequently infected with VCMS 13 helper phage to start the second round of antibody display and in vitro selection. A total of 4 to 5 rounds of selections are carried out, normally.

[0814] In order to screen for PSCA specific binders plasmid DNA corresponding to 4 and 5 rounds of panning is isolated from E. coli cultures after selection. For the production of soluble scFv-protein, VH-VL-DNA fragments are excised from the plasmids (XhoI-SpeI). These fragments are cloned via the same restriction sites into the plasmid pComb3H5BFlag/His differing from the original pComb3H5BHis in that the expression construct (e.g. scFv) includes a Flag-tag (DYKDDDDK) between the scFv and the His6-tag and the additional phage proteins are deleted. After ligation, each pool (different rounds of panning) of plasmid DNA is transformed into 100 μl heat shock competent E. coli TG1 or XLI blue and plated onto carbenicillin LB-agar. Single colonies are picked into 100 ul of LB carb (50 ug/ml).

[0815] E. coli transformed with pComb3H5BHis containing a VL- and VH-segment produce soluble scFv in sufficient amounts after excision of the gene III fragment and induction with 1 mM IPTG. Due to a suitable signal sequence, the scFv-chain is exported into the periplasma where it folds into a functional conformation.

[0816] Single E. coli TG1 bacterial colonies from the transformation plates are picked for periplasmic small scale preparations and grown in SB-medium (e.g. 10 ml) supplemented with 20 mM MgCl₂ and carbenicillin 50 μg/ml (and re-dissolved in PBS (e.g. 1 ml) after harvesting. By four rounds of freezing at −70° C. and thawing at 37° C., the outer membrane of the bacteria is destroyed by temperature shock and the soluble periplasmic proteins including the scFvs are released into the supernatant. After elimination of intact cells and cell-debris by centrifugation, the supernatant containing the anti-PSCA scFvs is collected and used for the identification of PSCA specific binders as follows:

[0817] Binding of scFvs to PSCA is tested by flow cytometry on PSCA transfected CHO cells (see example 24.1); untransfected CHO cell are used as negative control.

[0818] For flow cytometry 2.5×10⁵ cells are incubated with 50 ul of scFv periplasmic preparation or with 5 μg/ml of purified scFv in 50 μl PBS with 2% FCS. The binding of scFv is detected with an anti-His antibody (Penta-His Antibody, BSA free, Qiagen GmbH, Hilden, FRG) at 2 μg/ml in 50 μl PBS with 2% FCS. As a second step reagent a R-Phycoerythrin-conjugated affinity purified F(ab′)₂ fragment, goat anti-mouse IgG (Fc-gamma fragment specific), diluted 1:100 in 50 μl PBS with 2% FCS (Dianova, Hamburg, FRG) is used. The samples are measured on a FACSscan (BD biosciences, Heidelberg, FRG).

[0819] Single clones are then analyzed for favourable properties and amino acid sequence. PSCA specific scFvs are converted into recombinant bispecific single chain antibodies by joining them via a Gly₄Ser₁-linker with the CD3 specific scFv I2C (SEQ ID NO. 185) or any other CD3 specific scFv of the invention to result, for example, in constructs with the domain arrangement VH_{PSCA}-(Gly₄Ser₁)₃-VL_{PSCA}-Gly₄Ser₁-VH_{CD3}-(Gly₄Ser₁)₃-VL_{CD3} or VL_{PSCA}-(Gly₄Ser₁)₃-VH_{PSCA}-Gly₄Ser₁-VH_{CD3}-(Gly₄Ser₁)₃-VL_{CD3} or alternative domain arrangements. For expression in CHO cells the coding sequences of (i) an N-terminal immunoglobulin heavy chain leader comprising a start codon embedded within a Kozak consensus sequence and (ii) a C-terminal His₆-tag followed by a stop codon are both attached in frame to the nucleotide sequence encoding the bispecific single chain antibodies prior to insertion of the resulting DNA-fragment as obtained by gene synthesis into the multiple cloning site of the expression vector pEF-DHFR (Raum et al. Cancer Immunol Immunother 50 (2001) 141-150). Stable transfection of DHFR-deficient CHO cells, selection for DHFR-positive transfectants secreting the bispecific single chain antibodies into the culture supernatant and gene amplification with methotrexat for increasing expression levels are carried out as described (Mack et al. Proc. Natl. Acad. Sci. USA 92 (1995) 7021-7025). All other state of the art procedures are carried out according to standard protocols (Sambrook, Molecular Cloning; A Laboratory Manual, 3rd edition, Cold Spring Harbour Laboratory Press, Cold Spring Harbour, New York (2001)).

[0820] Identification of functional bispecific single-chain antibody constructs is carried out by flowcytometric analysis of culture supernatant from transfected CHO cells. For this purpose CD3 binding is tested on the human CD3 positive T cell leukemia cell line HPB-ALL (DSMZ, Braunschweig, ACC483) and on the macaque T cell line 4119LnPx. Binding to tumor specific PSCA epitopes is tested on PSCA transfected CHO cells (see example 24.1). 200.000 cells of the respective cell line are incubated for 30 min. on ice with 50 μl of cell culture supernatant. The cells are washed twice in PBS with 2% FCS and bound bispecific single-chain antibody construct is detected with a murine anti-His antibody (Penta His antibody; Qiagen; diluted 1:20 in 50 μl PBS with 2% FCS). After washing, bound anti-His antibodies are detected with an Fc gamma-specific antibody (Dianova) conjugated to phycoerythrin, diluted 1:100 in PBS with 2% FCS. Supernatant of untransfected CHO cells is used as negative control.

[0821] Flow cytometry is performed on a FACS-Calibur apparatus; the CellQuest software is used to acquire and analyze the data (Becton Dickinson biosciences, Heidelberg). FACS staining and measuring of the fluorescence intensity are performed as described in Current Protocols in Immunology (Coligan, Kruisbeek, Margulies, Shevach and Strober, Wiley-Interscience, 2002).

[0822] Only those constructs showing bispecific binding to human and macaque CD3 as well as to human and macaque PSCA are selected for further use.

[0823] For protein production CHO cells expressing fully functional bispecific single chain antibody and adapted to nucleoside-free HyQ PF CHO liquid soy medium (with 4.0 mM L-Glutamine with 0.1% Pluronic F-68; HyClone) are grown in roller bottles with nucleoside-free HyQ PF CHO liquid soy medium (with 4.0 mM L-Glutamine with 0.1% Pluronic F-68; HyClone) for 7 days. Culture supernatant is cleared from cells by centrifugation and stored at −20° C. until purification. As chromatography equipment for purification of bispecific single chain antibody from culture supernatant Äkta® Explorer System (GE Health Systems) and Unicorn® Software are used. Immobilized metal affinity chromatography (“IMAC”) is performed using a Fractogel EMD Chelate® (Merck) which is loaded with ZnCl₂ according to the protocol provided by the manufacturer. The column is equilibrated with buffer A (20 mM sodium phosphate buffer pH 7.2, 0.1 M NaCl) and the cell culture supernatant (500 nil) is applied to the column (10 ml) at a flow rate of 3 ml/min. The column is washed with buffer A to remove unbound sample. Bound protein is eluted using a two step gradient of buffer B (20 mM sodium phosphate buffer pH 7.2, 0.1 M NaCl, 0.5 M Imidazole) according to the following:

Step 1: 20% buffer B in 6 column volumes
Step 2: 100% buffer B in 6 column volumes

[0824] Eluted protein fractions from step 2 are pooled for further purification. All chemicals are of research grade and purchased from Sigma (Deisenhofen) or Merck (Darmstadt).

[0825] Gel filtration chromatography is performed on a HiLoad 16/60 Superdex 200 prep grade column (GE/Amersham) equilibrated with Equi-buffer (25 mM Citrate, 200 mM Lysine, 5% Glycerol, pH 7.2). Eluted protein samples (flow rate 1 ml/min) are subjected to standard SDS-PAGE and Western Blot for detection. Prior to purification, the column is calibrated for molecular weight determination (molecular weight marker kit, Sigma MW GF-200). Protein concentrations are determined using OD280 nm.

[0826] Purified bispecific single chain antibody protein is analyzed in SDS PAGE under reducing conditions performed with pre-cast 4-12% Bis Tris gels (Invitrogen). Sample preparation and application are performed according to the protocol provided by the manufacturer. The molecular weight is determined with MultiMark protein standard (Invitrogen). The gel is stained with colloidal Coomassie (Invitrogen protocol). The purity of the isolated protein is >95% as determined by SDS-PAGE.

[0827] The bispecific single chain antibody has a molecular weight of about 52 kDa under native conditions as determined by gel filtration in PBS. All constructs are purified according to this method.

[0828] Western Blot is performed using an Optitran® BA-S83 membrane and the Invitrogen Blot Module according to the protocol provided by the manufacturer. For detection of the bispecific single chain antibody protein antibodies an anti-His Tag antibody is used (Penta His, Qiagen). A Goat-anti-mouse Ig antibody labeled with alkaline phosphatase (AP) (Sigma) is used as secondary antibody and BCIP/NBT (Sigma) as substrate. A single band is detected at 52 kD corresponding to the purified bispecific single chain antibody.

[0829] The potency in the human and the non-chimpanzee primate system of bispecific single chain antibodies interacting with human and macaque CD3 and with human and macaque PSCA is determined by a cytotoxicity assay based on chromium 51 (⁵¹Cr) release using PSCA transfected CHO cells as target cells (see example 24.1) and stimulated human CD4/CD56 depleted PBMC or the macaque T cell line 4119LnPx as effector cells.

[0830] Generation of stimulated human PBMC is performed as follows: A Petri dish (85 mm diameter, Nunc) is coated with a commercially available anti-CD3 specific antibody (e.g. OKT3, Othoclone) in a final concentration of 1 μg/ml for 1 hour at 37° C. Unbound protein is removed by one washing step with PBS. The fresh PBMC are isolated from peripheral blood (30-50 ml human blood) by Ficoll gradient centrifugation according to standard protocols. 3-5×10⁷ PBMC are added to the precoated petri dish in 50 ml of RPMI 1640 with stabilized glutamine/10% FCS/IL-2 20 U/ml (Proleukin, Chiron) and stimulated for 2 days. On the third day the cells are collected and washed once with RPMI 1640. IL-2 is added to a final concentration of 20 U/ml and the cells are cultivated again for one day in the same cell culture medium as above.

[0831] Target cells are washed twice with PBS and labelled with 11.1 MBq ⁵¹Cr in a final volume of 100 μl RPMI with 50% FCS for 45 minutes at 37° C. Subsequently the labelled target cells are washed 3 times with 5 ml RPMI and then used in the cytotoxicity assay. The assay is performed in a 96 well plate in a total volume of 250 μl supplemented RPMI (as above) with an E:T ratio of 10:1. 1 μg/ml of the cross-species specific bispecific single chain antibody molecules and 20 threefold dilutions thereof are applied. The assay time is 18 hours and cytotoxicity is measured as relative values of released chromium in the supernatant related to the difference of maximum lysis (addition of Triton-X) and spontaneous lysis (without effector cells). All measurements are done in quadruplicates. Measurement of chromium activity in the supernatants is performed with a Wizard 3″ gamma counter (Perkin Elmer Life Sciences GmbH, Köln, Germany). Analysis of the experimental data is performed with Prism 4 for Windows (version 4.02, GraphPad Software Inc., San Diego, Calif., USA). Sigmoidal dose response curves typically have R² values>0.90 as determined by the software. EC₅₀ values as measure of potency are calculated by the analysis program.

### 25. Generation and Characterization of CD19 and CD3 Cross-Species Specific Bispecific Single Chain Antibody Molecules

### 25.1. Cloning and Expression of Human CD19 Antigen on CHO Cells

[0832] The sequence of the human CD19 antigen (NM_001770 Homo sapiens CD19 molecule (CD19), mRNA, National Center for Biotechnology Information, http://www.ncbi.nlm.nih.gov/entrez) was used to obtain a synthetic molecule by gene synthesis according to standard protocols. The gene synthesis fragment was also designed as to contain a Kozak site for eukaryotic expression of the construct and restriction sites at the beginning and the end of the DNA. The introduced restriction sites EcoRI at the 5′ end and SalI at the 3′ end were utilised during the cloning step into the expression plasmid designated pEFDHFR (Raum et al. Cancer Immunol Immunother 50 (2001) 141-150). After sequence verification the plasmid was used to transfect CHO/dhfr− cells as follows. A sequence verified plasmid was used to transfect CHO/dhfr− cells (ATCC No. CRL 9096; cultured in RPMI 1640 with stabilized glutamine obtained from Biochrom AG Berlin, Germany, supplemented with 10% FCS, 1% penicillin/streptomycin all obtained from Biochrom AG Berlin, Germany and nucleosides from a stock solution of cell culture grade reagents obtained from Sigma-Aldrich Chemie GmbH, Taufkirchen, Germany, to a final concentration of 10 μg/ml Adenosine, 10 μg/ml Deoxyadenosine and 10 μg/ml Thymidine, in an incubator at 37 C, 95% humidity and 7% CO2). Transfection was performed using the PolyFect Transfection Reagent (Qiagen GmbH, Hilden, Germany) and 5 μg of plasmid DNA according to the manufacturer's protocol. After culture period of 24 hours cells were washed once with PBS and again cultured in the aforementioned cell culture medium except that the medium was not supplemented with nucleosides and dialysed FCS (obtained from Biochrom AG Berlin, Germany) was used. Thus the cell culture medium did not contain nucleosides and thereby selection was applied on the transfected cells. Approximately 14 days after transfection the outgrowth of resistant cells was observed. After an additional 7 to 14 days the transfectants were tested positive for expression of the construct via FACS. Eukaryotic protein expression in DHFR deficient CHO cells is performed as described by Kaufmann R. J. (1990) Methods Enzymol. 185, 537-566. Gene amplification of the construct is induced by increasing concentrations of methothrexate (MTX) to a final concentration of up to 20 nM MTX.

### 25.2. Generation of CD19 and CD3 Cross-Species Specific Bispecific Single Chain Molecules

[0833] Generally, bispecific single chain antibody molecules, each comprising a domain with a binding specificity for the human and the macaque CD3 antigen as well as a domain with a binding specificity for the human CD19 antigen, were designed as set out in the following Table 8:

TABLE 8
Formats of anti-CD3 and anti-CD19 cross-species
specific bispecific single chain antibody molecules

| SEQ ID | Formats of protein constructs |
|---|---|
| (nucl/prot) | (N → C) |
| 482/481 | HD37 LH x I2C HL |
| 486/485 | HD37 LH x F12Q HL |
| 484/483 | HD37 LH x H2C HL |
| 534/533 | hCD19 47-A3 LH x I2C HL |
| 522/521 | hCD19 46-B11LH x I2C HL |
| 510/509 | hCD19 45-A10 LH x I2C HL |
| 498/497 | hCD19 26-D6 LH x I2C HL |
| 546/545 | HD37-DT LH x I2C HL |
| 558/557 | HD37-A LH x I2C HL |
| 570/569 | HD37-G LH x I2C HL |
| 582/581 | HD37-S LH x I2C HL |
| 594/593 | HD37-T LH x I2C HL |
| 606/605 | HD37-I LH x I2C HL |
| 618/617 | HD37-L LH x I2C HL |
| 630/629 | HD37-V LH x I2C HL |
| 642/641 | HD37-E LH x I2C HL |
| 654/653 | HD37-Q LH x I2C HL |
| 666/665 | HD37-N LH x I2C HL |
| 678/677 | HD37-K LH x I2C HL |
| 690/689 | HD37-R LH x I2C HL |
| 702/701 | HD37-H LH x I2C HL |
| 714/713 | HD37-Y LH x I2C HL |
| 726/725 | HD37-P LH x I2C HL |
| 738/737 | HD37-F LH x I2C HL |
| 750/749 | HD37-W LH x I2C HL |
| 762/761 | HD37-M LH x I2C HL |
| 1283/1282 | hCD19 5-A9 LH x I2C HL |
| 1297/1296 | hCD19 2-C6 LH x I2C HL |
| 1311/1310 | hCD19 4-C7 LH x I2C HL |
| 1325/1324 | hCD19 2-D7 LH x I2C HL |
| 1339/1338 | hCD19 2-D4 LH x I2C HL |
| 1353/1352 | hCD19 5-G3 LH x I2C HL |
| 1367/1366 | hCD19 4-E10 LH x I2C HL |
| 1381/1380 | hCD19 4-E3 LH X I2C HL |
| 1395/1394 | hCD19 3-H7 LH X I2C HL |

[0834] The aforementioned constructs containing the variable light-chain (L) and variable heavy-chain (H) domains specific for human CD19 and the CD3 specific VH and VL combinations cross-species specific for human and macaque CD3 were obtained by gene synthesis. The gene synthesis fragments were designed and eukaryotic protein expression was performed in analogy to the procedure described in example 9 for the MCSP×CD3 cross-species specific single chain molecules.

### 25.3. Expression and Purification of the Bispecific Single Chain Antibody Molecules

[0835] The bispecific single chain antibody molecules were expressed in chinese hamster ovary cells (CHO) or HEK 293 cells as described herein above for the MCSP×CD3 bispecific single chain antibodies.

[0836] The isolation and analysis of the expressed bispecific single chain antibodies has also been described herein above in Example 9.

### 25.4. Flow Cytometric Binding Analysis of the CD19 and CD3 Cross-Species Specific Bispecific Antibodies

[0837] In order to test the functionality of the cross-species specific bispecific antibody constructs with regard to binding capability to human CD19 as well as to human and macaque CD3, a FACS analysis was performed. For this purpose the CHO cells transfected with human CD19 as described in example 25.1 and human CD3 positive T cell leukemia cell line HPB-ALL (DSMZ, Braunschweig, ACC483) were used to check the binding to human antigens. The binding reactivity to macaque CD3 was tested by using a macaque T cell line 4119LnPx (kindly provided by Prof Fickenscher, Hygiene Institute, Virology, Erlangen-Nuernberg; Knappe A, et al., and Fickenscher H: Herpesvirus saimiri-transformed macaque T cells are tolerated and do not cause lymphoma after autologous reinfusion. Blood 2000; 95:3256-61.) 200,000 cells of the respective cell population were incubated for 30 min on ice with 50 μl of the purified protein of the cross-species specific bispecific antibody constructs (e. g. 2 μg/ml) Alternatively the cell culture supernatant of transiently produced proteins was used. The cells were washed twice in PBS and binding of the construct was detected with an unlabeled murine Penta His antibody (Qiagen; diluted 1:20 in 50 μl PBS with 2% FCS). After washing, bound anti His antibodies were detected with an Fc gamma-specific antibody (Dianova) conjugated to phycoerythrin, diluted 1:100 in 50 μl PBS with 2% FCS. Fresh culture medium was used as a negative control.

[0838] Flow cytometry was performed on a FACS-Calibur apparatus, the CellQuest software was used to acquire and analyze the data (Becton Dickinson biosciences, Heidelberg). FACS staining and measuring of the fluorescence intensity were performed as described in Current Protocols in Immunology (Coligan, Kruisbeek, Margulies, Shevach and Strober, Wiley-Interscience, 2002).

[0839] In the FAGS analysis shown in FIG. 50 all tested constructs showed binding to human and macaque CD3 and to human CD19.

### 25.5. Bioactivity of CD19 and CD3 Cross-Species Specific Bispecific Single Chain Antibodies

[0840] The bioactivity of bispecific single chain antibodies was analyzed by chromium 51 release in vitro cytotoxicity assays using the CD19 positive cell line described in example 25.1. As effector cells stimulated human CD8 positive T cells or the macaque T cell line 4119LnPx were used.

[0841] The generation of stimulated human PBMC was described herein above in Example 11.

[0842] Target cells prepared and the assay was performed in analogy to the procedure described for the MCSP×CD3 bispecific single chain antibodies in example 11. In the T cell cytotoxicity assay shown in FIG. 51 all tested bispecific single chain antibody constructs revealed cytotoxic activity against human CD19 positive target cells elicited by human CD8+ cells and against human CD19 positive target cells elicited by the macaque T cell line 4119LnPx. As a negative control, an irrelevant bispecific single chain antibody was used.

### 25.6. Generation of Additional CD19 and CD3 Cross-Species Specific Bispecific Single Chain Molecules

[0843] The human antibody germline VH sequence VH1 1-46 (http://vbase.mrc-cpe.cam.ac.uk/) is chosen as framework context for CDRH1 (SEQ ID NO 473), CDRH2 (SEQ ID NO 474) and CDRH3 (SEQ ID NO 475). For the human VH several degenerated oligonucleotides have to be synthesized that overlap in a terminal stretch of approximately 15-20 nucleotides. To this end every second primer is an antisense primer. For VH1 1-46 the following oligonucleotides are used (5′- to 3′):

5′-37VH-aXho1
(SEQ ID NO 763)
CAG CTG CTC GAG TCT GGG GCT GAG STG RWG ARG CCT
GGG KCC TCA GTG AAG RTT TCC TGC AAG GCT TCT GGC
3′-37VH-b
(SEQ ID NO 764)
cca ctc aag acc ctg tcc agg GSS ctg cYt cac cca
gtt cat cca gta gct aGw gaa tgY ata gcc aga agc
ctt gca gga
5′-37VH-c
(SEQ ID NO 765)
GGA CAG GGT CTT GAG TGG ATK GGA CAG ATT TGG CCT
GGA GAT GGT GAT ACT AAC TAC AAT GGA AAG TTG AAG
3′-37VH-d
(SEQ ID NO 766)
cag gct gct gag ttS cat gta gRc tgt gct ggt gga
tKY gtc ASS agt caK agt gRc tYt acc ctt gaa ctt
tcc att gta g
5′-37VH-e
(SEQ ID NO 767)
C ATG SAA CTC AGC AGC CTG SSA TCT GAG GAC ACT GCG
GTC TAT TWC TGT GCA AGA CGG GAG ACT ACG ACG G
3′-37VH-fBstE2
(SEQ ID NO 768)
gga gac ggt gac cgt ggt ccc ttg gcc cca gta gtc
cat agc ata gta ata acg gcc tac cgt cgt agt ctc
ccg tct tgc

[0844] This primer set spans over the whole corresponding VH sequence.

[0845] Within the set primers are mixed in equal amounts (e.g. 1 μl of each primer (primer stocks 20 to 100 μM) to a 20 μl PCR reaction) and added to a PCR mix consisting of PCR buffer, nucleotides and Taq polymerase. This mix is incubated at 94° C. for 3 minutes, 65° C. for 1 minute, 62° C. for 1 minute, 59° C. for 1 minute, 56° C. for 1 minute, 52° C. for 1 minute, 50° C. for 1 minute and at 72° C. for 10 minutes in a PCR cycler. Subsequently the product is run in an agarose gel electrophoresis and the product of a size from 200 to 400 isolated from the gel according to standard methods.

[0846] The VH PCR product is then used as a template for a standard PCR reaction using primers that incorporate N-terminal and C-terminal suitable cloning restriction sites. The DNA fragment of the correct size (for a VH approximately 350 nucleotides) is isolated by agarose gel electrophoresis according to standard methods. In this way sufficient VH DNA fragment is amplified.

[0847] The human antibody germline VL sequence VkI 012 (http://vbase.mrc-cpe.cam.ac.uk/) is chosen as framework context for CDRL1 (SEQ ID NO 478), CDRL2 (SEQ ID NO 479) and CDRL3 (SEQ ID NO 480). For the human VL several degenerated oligonucleotides have to be synthesized that overlap in a terminal stretch of approximately 15-20 nucleotides. To this end every second primer is an antisense primer. Restriction sites needed for later cloning within the oligonucleotides are deleted. For VkI O12 the following oligonucleotides are used (5′- to 3′):

5′-37VL-A-SacI
(SEQ ID NO 769)
CAG CTG GAG CTC CAG ATG ACC CAG TCT CCA KCT TCT
TTG KCT GYG TCT STA GGG SAS AGA GYC ACC ATC WCC
TGC AAG GCC AGC
3′-37VL-B
(SEQ ID NO 770)
ctg ttg gta cca gtt caa ata aSt SNN acc atc ata
atc aac act ttg gct ggc ctt gca ggt gat ggt
5′-37VL-C
(SEQ ID NO 771)
TTG AAC TGG TAC CAA CAG AWA CCA GGA MAG SCA CCC
AAA CTC CTC ATC TAT GAT GCA TCC AAT CTA GTT TCT
3′-37VL-D
(SEQ ID NO 772)
gag ggt gaa gtc tgt ccc aga ccc act gcc act aaa
cct ggR tgg gaY ccc aga aac tag att gga tgc
5′-37VL-E
(SEQ ID NO 773)
GGG ACA GAC TTC ACC CTC AMC ATC MRT YCT STG SAG
MMG GWG GAT KYC GCA ACC TAT YAC TGT CAG CAA AGT
ACT GAG
3′-37VL-F-BsiW1Spe1
(SEQ ID NO 774)
ACT CAG ACT AGT CGT ACG ttt gat ctc cac ctt ggt
ccc ttg acc gaa cgt cca cgg atc ctc agt act ttg
ctg aca g

[0848] This primer sets spans over the whole corresponding VL sequence.

[0849] Within the set primers are mixed in equal amounts (e.g. 1 μl of each primer (primer stocks 20 to 100 μM) to a 20 μl PCR reaction) and added to a PCR mix consisting of PCR buffer, nucleotides and Taq polymerase. This mix is incubated at 94° C. for 3 minutes, 65° C. for 1 minute, 62° C. for 1 minute, 59° C. for 1 minute, 56° C. for 1 minute, 52° C. for 1 minute, 50° C. for 1 minute and at 72° C. for 10 minutes in a PCR cycler. Subsequently the product is run in an agarose gel electrophoresis and the product of a size from 200 to 400 isolated from the gel according to standard methods.

[0850] The VL PCR product is then used as a template for a standard PCR reaction using primers that incorporate N-terminal and C-terminal suitable cloning restriction sites. The DNA fragment of the correct size (for a VL approximately 330 nucleotides) is isolated by agarose gel electrophoresis according to standard methods. In this way sufficient VL DNA fragment is amplified.

[0851] The final VH1 1-46-based VH PCR product (i.e. the repertoire of human/humanized VH) is then combined with the final VkI 012-based VL PCR product (i.e. the repertoire of human/humanized VL) in the phage display vector pComb3H5Bhis to form a library of functional scFvs from which—after display on filamentous phage-anti-CD19 binders are selected, screened, identified and confirmed as described in the following:

[0852] 450 ng of the light chain fragments (SacI-SpeI digested) are ligated with 1400 ng of the phagemid pComb3H5Bhis (SacI-SpeI digested; large fragment). The resulting combinatorial antibody library is then transformed into 300 μl of electrocompetent Escherichia coli XL1 Blue cells by electroporation (2.5 kV, 0.2 cm gap cuvette, 25 μFD, 200 Ohm, Biorad gene-pulser) resulting in a library size of more than 107 independent clones. After one hour of phenotype expression, positive transformants are selected for carbenicilline resistance encoded by the pComb3H5BHis vector in 100 ml of liquid super broth (SB)-culture over night. Cells are then harvested by centrifugation and plasmid preparation is carried out using a commercially available plasmid preparation kit (Qiagen).

[0853] 2800 ng of this plasmid-DNA containing the VL-library (XhoI-BstEII digested; large fragment) are ligated with 900 ng of the heavy chain V-fragments (XhoI-BstEII digested) and again transformed into two 300 μl aliquots of electrocompetent E. coli XL1 Blue cells by electroporation (2.5 kV, 0.2 cm gap cuvette, 25 μFD, 200 Ohm) resulting in a scFv library with a size of more than 107 independent clones.

[0854] After phenotype expression and slow adaptation to carbenicilline, the E. coli cells containing the antibody library are transferred into SB-carbenicilline (SB with 50 μg/mL carbenicilline) selection medium. The E. coli cells containing the antibody library are then infected with an infectious dose of 1012 particles of helper phage VCSM13 resulting in the production and secretion of filamentous M13 phage, wherein each phage particle contains single stranded pComb3H5BHis-DNA encoding a scFv-fragment and displays the corresponding scFv-protein as a translational fusion to phage coat protein Ill. This pool of phages displaying the antibody library is used for the selection of antigen binding entities.

[0855] For this purpose the phage library carrying the cloned scFv-repertoire is harvested from the respective culture supernatant by PEG8000/NaCl precipitation and centrifugation. Approximately 1011 to 1012 scFv phage particles are resuspended in 0.4 ml of PBS/0.1% BSA and incubated with 105 to 107 CD19 transfected CHO cells (see example 1) for 1 hour on ice under slow agitation. These CD19 transfected CHO cells are harvested beforehand by centrifugation, washed in PBS and resuspended in PBS/1 FCS (containing Na Azide). scFv phage which do not specifically bind to the CD19 transfected CHO cells are eliminated by up to five washing steps with PBS/1% FCS (containing Na Azide). After washing, binding entities are eluted from the cells by resuspending the cells in HCl-glycine pH 2.2 (10 min incubation with subsequent vortexing) and after neutralization with 2 M Tris pH 12, the eluate is used for infection of a fresh uninfected E. coli XL1 Blue culture (OD600>0.5). The E. coli culture containing E. coli cells successfully transduced with a phagemid copy, encoding a human/humanized scFv-fragment, are again selected for carbenicilline resistance and subsequently infected with VCMS 13 helper phage to start the second round of antibody display and in vitro selection. A total of 4 to 5 rounds of selections are carried out, normally.

[0856] In order to screen for CD19 specific binders plasmid DNA corresponding to 4 and 5 rounds of panning is isolated from E. coli cultures after selection. For the production of soluble scFv-protein, the scFv-DNA fragments are excised from the plasmids (XhoI-SpeI). These fragments are cloned via the same restriction sites into the plasmid pComb3H5BFlag/His differing from the original pComb3H5BHis in that the expression construct (i.e. the scFv) includes a Flag-tag (DYKDDDDK, SEQ ID NO 775) at its C-terminus before the His6-tag and that phage protein III/N2 domain and protein III/CT domain had been deleted. After ligation, each pool (different rounds of panning) of plasmid DNA is transformed into 100 μl heat shock competent E. coli TG1 or XLI blue and plated onto carbenicilline LB-agar. Single colonies are picked into 100 μl of LB carb (LB with 50 μg/ml carbenicilline).

[0857] E. coli transformed with pComb3H5BFlag/His containing a scFv-DNA fragment produce soluble scFv-protein in sufficient amounts after induction with 1 mM IPTG. Due to a suitable signal sequence, the scFv is exported into the periplasma where it folds into a functional conformation.

[0858] Single E. coli TG1 bacterial colonies from the transformation plates are picked for periplasmic small scale preparations and grown in SB-medium (e.g. 10 ml) supplemented with 20 mM MgCl2 and carbenicilline 50 μg/ml (and re-dissolved in PBS (e.g. 1 ml) after harvesting. A temperature shock is applied by four rounds of freezing at −70° C. and thawing at 37° C. whereby the outer membrane of the bacteria is destroyed and the soluble periplasmic proteins including the scFvs are released into the supernatant. After elimination of intact cells and cell-debris by centrifugation, the supernatant containing the anti-CD19 scFvs is collected and used for the identification of CD19 specific binders as follows:

[0859] Binding of scFvs to CD19 is tested by flow cytometry on CD19 transfected CHO cells (see example 25.1); untransfected CHO cells are use as negative control.

[0860] For flow cytometry 2.5×105 cells are incubated with 50 μl of scFv periplasmic preparation or with 5 μg/ml of purified scFv in 50 μl PBS with 2% FCS. The binding of scFv is detected with an anti-His antibody (Penta-His Antibody, BSA free, Qiagen GmbH, Hilden, FRG) at 2 μg/ml in 50 μl PBS with 2% FCS. As a second step reagent a R-Phycoerythrin-conjugated affinity purified F(ab′)2 fragment, goat anti-mouse IgG (Fc-gamma fragment specific), diluted 1:100 in 50 μl PBS with 2% FCS (Dianova, Hamburg, FRG) is used. The samples are measured on a FACSscan (BD biosciences, Heidelberg, FRG).

[0861] Single clones are then analyzed for favourable properties and amino acid sequence. CD19 specific scFvs are converted into recombinant bispecific single chain antibodies by joining them via a Gly4Ser1-linker with the CD3 specific scFv I2C (amino acid sequence SEQ ID NO 185, nucleic acid sequence SEQ ID NO 186) or any other CD3 specific scFv of the invention to result in constructs with the domain arrangement VLCD19-(Gly4Ser1)3-VHCD19-Gly4Ser1-VHCD3-(Gly4Ser1)3-VLCD3. For expression in CHO cells the coding sequences of (i) an N-terminal immunoglobulin heavy chain leader comprising a start codon embedded within a Kozak consensus sequence and (ii) a C-terminal His6-tag followed by a stop codon are both attached in frame to the nucleotide sequence encoding the bispecific single chain antibodies prior to insertion of the resulting DNA-fragment as obtained by gene synthesis into the multiple cloning site of the expression vector pEF-DHFR (Raum et al. Cancer Immunol Immunother 50 (2001) 141-150). Transfection of the generated expression plasmids, protein expression and purification of cross-species specific bispecific antibody constructs are performed as described in Examples 25.2 and 25.3. All other state of the art procedures are carried out according to standard protocols (Sambrook, Molecular Cloning; A Laboratory Manual, 3rd edition, Cold Spring Harbour Laboratory Press, Cold Spring Harbour, New York (2001)).

[0862] Identification of functional bispecific single-chain antibody constructs is carried out by flow cytometric binding analysis of culture supernatant from transfected cells expressing the cross-species specific bispecific antibody constructs. Analysis is performed as described in Example 25.4.

[0863] Only those constructs showing bispecific binding to human and macaque CD3 as well as to CD19 are selected for further use.

[0864] The cytotoxic activity of cross-species specific bispecific single chain antibody constructs against CD19 positive target cells elicited by effector T cells is analyzed as described in Example 25.5. CHO-cells transfected with human CD19 are used as target cells and stimulated CD4/CD56-depleted human PBMCs or the macaque T cell line 4119LnPx as effector T cells. Only those constructs showing potent redirected T cell cytotoxicity against CD19-positive target cells are selected for further use.

### 26. Generation and Characterization of C-MET and CD3 Cross-Species Specific Bispecific Single Chain Antibody Molecules

### 26.1 Generation of CHO Cells Expressing Human C-MET

[0865] The coding sequence of human C-MET as published in GenBank (Accession number NM_000245) was obtained by gene synthesis according to standard protocols. The gene synthesis fragment was designed as to contain first a Kozak site for eukaryotic expression of the construct followed by the coding sequence of the human C-MET protein and a stop codon (the cDNA and amino acid sequence of the construct is listed under SEQ ID Nos 776 and 777). The gene synthesis fragment was also designed as to introduce restriction sites at the beginning and at the end of the fragment. The introduced restriction sites, EcoRI at the 5′ end and SalI at the 3′ end, were utilised in the following cloning procedures. Internal restriction sites were removed by silent mutation of the coding sequence in the gene synthesis fragment (SalI: nucleotide 366 from C to G; EcoRI and XbaI: nucleotides 2059 to 2061 from TCT to AGC; EcoRI: nucleotide 2304 from T to C). The gene synthesis fragment was cloned via EcoRI and SalI into a plasmid designated pEF-DHFR (pEF-DHFR is described in Raum et al. Cancer Immunol Immunother 50 (2001) 141-150) following standard protocols. The aforementioned procedures were carried out according to standard protocols (Sambrook, Molecular Cloning; A Laboratory Manual, 3rd edition, Cold Spring Harbour Laboratory Press, Cold Spring Harbour, New York (2001)). A clone with sequence-verified nucleotide sequence was transfected into DHFR deficient CHO cells for eukaryotic expression of the construct. Eukaryotic protein expression in DHFR deficient CHO cells was performed as described by Kaufmann R. J. (1990) Methods Enzymol. 185, 537-566. Gene amplification of the construct was induced by increasing concentrations of methotrexate (MTX) to a final concentration of up to 20 nM MTX.

### 26.2 Generation of CHO Cells Expressing Macaque C-MET

[0866] The cDNA sequence of macaque C-MET (cynomolgus) was obtained by a set of 5 PCRs on cDNA from macaque monkey Liver prepared according to standard protocols. The following reaction conditions: 1 cycle at 94° C. for 2 minutes followed by 40 cycles with 94° C. for 1 minute, 56° C. for 1 minute and 72° C. for 3 minutes followed by a terminal cycle of 72° C. for 3 minutes and the following primers were used:

4. forward primer:
(SEQ ID NO: 778)
5′-aggaattcaccatgaaggcccccgctgtgcttgcacc-3′
reverse primer:
(SEQ ID NO: 779)
5′-ctccagaggcatttccatgtagg-3′
5. forward primer:
(SEQ ID NO: 780)
5′-gtccaaagggaaactctagatgc-3′
reverse primer:
(SEQ ID NO: 781)
5′-ggagacactggatgggagtccagg-3′
6. forward primer:
(SEQ ID NO: 782)
5′-catcagagggtcgcttcatgcagg-3′
reverse primer:
(SEQ ID NO: 783)
5′-gctttggttttcagggggagttgc-3′
7. forward primer:
(SEQ ID NO: 784)
5′-atccaaccaaatcttttattagtggtgg-3′
reverse primer:
(SEQ ID NO: 785)
5′-gacttcattgaaatgcacaatcagg-3′
8. forward primer:
(SEQ ID NO: 786)
5′-tgctctaaatccagagctggtcc-3′
reverse primer:
(SEQ ID NO: 787)
5′-gtcagataagaaattccttagaatcc-3′

[0867] These PCRs generated five overlapping fragments, which were isolated and sequenced according to standard protocols using the PCR primers, and thereby provided a portion of the cDNA sequence coding macaque C-MET from codon 10 of the leader peptide to the last codon of the mature protein. To generate a construct for expression of macaque C-MET a cDNA fragment was obtained by gene synthesis according to standard protocols (the cDNA and amino acid sequence of the construct is listed under SEQ ID Nos 788 and 789). In this construct the coding sequence of macaque C-MET from amino acid 10 of the leader peptide to the last amino acid of the mature C-MET protein followed by a stop codon was fused in frame to the coding sequence of the amino acids 1 to 9 of the leader peptide of the human C-MET protein. The gene synthesis fragment was also designed as to contain a Kozak site for eukaryotic expression of the construct and restriction sites at the beginning and the end of the fragment containing the cDNA. The introduced restriction sites, EcoRI at the 5′ end and SalI at the 3′ end, were utilised in the following cloning procedures. Internal restriction sites were removed by silent mutation of the coding sequence in the gene synthesis fragment (SalI: nucleotide 366 from C to G; EcoRI: nucleotide 2055 from G to C). The gene synthesis fragment was cloned via EcoRI and SalI into a plasmid designated pEF-DHFR (pEF-DHFR is described in Raum et al. Cancer Immunol Immunother 50 (2001) 141-150) following standard protocols. The aforementioned procedures were carried out according to standard protocols (Sambrook, Molecular Cloning; A Laboratory Manual, 3rd edition, Cold Spring Harbour Laboratory Press, Cold Spring Harbour, New York (2001)). A clone with sequence-verified nucleotide sequence was transfected into DHFR deficient CHO cells for eukaryotic expression of the construct. Eukaryotic protein expression in DHFR deficient CHO cells was performed as described by Kaufmann R. J. (1990) Methods Enzymol. 185, 537-566. Gene amplification of the construct was induced by increasing concentrations of methotrexate (MTX) to a final concentration of up to 20 nM MTX.

### 26.3 Generation of C-MET and CD3 Cross-Species Specific Bispecific Single Chain Molecules

### Cloning of Cross-Species Specific Binding Molecules

[0868] Generally, bispecific single chain antibody molecules, each comprising a domain with a binding specificity cross-species specific for human and non-chimpanzee primate CD3epsilon as well as a domain with a binding specificity for C-MET, were designed as set out in the following Table 9:

TABLE 9
Formats of anti-C-MET and anti-CD3 cross-species
specific bispecific single chain antibody molecules

| SEQ ID | Formats of protein constructs |
|---|---|
| (nucl/prot) | (N → C) |
| 830/829 | MET1HLxI2CHL |
| 854/853 | MET4HLxI2CHL |
| 872/871 | MET5HLxI2CHL |
| 890/889 | MET6HLxI2CHL |
| 832/831 | MET1LHxI2CHL |
| 856/855 | MET4LHxI2CHL |
| 874/873 | MET5LHxI2CHL |
| 892/891 | MET6LHxI2CHL |
| 906/905 | MET7LHxI2CHL |

[0869] The aforementioned constructs containing the variable light-chain (L) and variable heavy-chain (H) domains specific for C-MET and the CD3 specific VH and VL combinations cross-species specific for human and macaque CD3 were obtained by gene synthesis. The gene synthesis fragments were designed and eukaryotic protein expression was performed in analogy to the procedure described in example 9 for the MCSP×CD3 cross-species specific single chain molecules. The bispecific single chain antibody molecules were expressed in chinese hamster ovary cells (CHO) or HEK 293 cells as described herein above for the MCSP×CD3 bispecific single chain antibodies.

[0870] The isolation and analysis of the expressed bispecific single chain antibodies has also been described herein above in Example 9.

[0871] As shown in FIG. 55 all of the generated cross-species specific bispecific single chain antibody constructs demonstrated cytotoxic activity against macaque cMET positive target cells elicited by the macaque T cell line 4119LnPx.

### 26.5 Flow Cytometric Binding Analysis of the C-MET and CD3 Cross-Species Specific Bispecific Antibodies

[0872] In order to test the functionality of the cross-species specific bispecific antibody constructs regarding the capability to bind to C-MET and human and macaque CD3, respectively, a FACS analysis was performed. For this purpose the human C-MET positive breast cancer cell line MDA-MB-231 (ATCC No. HTB-26) and the human CD3 positive T cell leukemia cell line HPB-ALL (DSMZ, Braunschweig, ACC483) were used to test the binding to human antigens. The binding reactivity to macaque CD3 was tested by using the macaque T cell line 4119LnPx (kindly provided by Prof Fickenscher, Hygiene Institute, Virology, Erlangen-Nuernberg; published in Knappe A, et al., and Fickenscher H., Blood 2000, 95, 3256-61). 200.000 cells of the respective cell lines were incubated for 30 min on ice with 50 μl of cell culture supernatant of transfected cells expressing the cross-species specific bispecific antibody constructs. The cells were washed twice in PBS with 2% FCS and binding of the construct was detected with a murine Penta His antibody (Qiagen; diluted 1:20 in 50 μl PBS with 2% FCS). After washing, bound anti His antibodies were detected with an Fc gamma-specific antibody (Dianova) conjugated to phycoerythrin, diluted 1:100 in PBS with 2% FCS. Supernatant of untransfected cells was used as a negative control.

[0873] Flow cytometry was performed on a FACS-Calibur apparatus, the CellQuest software was used to acquire and analyze the data (Becton Dickinson biosciences, Heidelberg). FACS staining and measuring of the fluorescence intensity were performed as described in Current Protocols in Immunology (Coligan, Kruisbeek, Margulies, Shevach and Strober, Wiley-Interscience, 2002).

[0874] The bispecific binding of the single chain molecules listed above, which are specific for C-MET and cross-species specific for human and non-chimpanzee primate CD3 was clearly detectable as shown in FIG. 52. In the FACS analysis all constructs showed binding to CD3 and C-MET compared to the negative control. Cross-species specificity of the bispecific antibodies for human and macaque CD3 was demonstrated.

### 26.6 Bioactivity of C-MET and CD3 Cross-Species Specific Bispecific Single Chain Antibodies

[0875] Bioactivity of the generated bispecific single chain antibodies was analyzed by chromium 51 (⁵¹Cr) release in vitro cytotoxicity assays using the MDA-MB-231 cell line. As effector cells stimulated human CD4/CD56 depleted PBMC were used.

[0876] The generation of stimulated human PBMC was described herein above in Example 11. Target cells prepared and the assay was performed in analogy to the procedure described for the MCSP×CD3 bispecific single chain antibodies in example 11. As shown in FIG. 53 all of the generated cross-species specific bispecific single chain antibody constructs demonstrated cytotoxic activity against C-MET positive target cells elicited by stimulated human CD4/CD56 depleted PBMC.

### 26.7 Generation of Additional C-MET and CD3 Cross-Species Specific Bispecific Single Chain Molecules

[0877] The human antibody germline VH sequence VH1 1-03 (http://vbase.mrc-cpe.cam.ac.uk/) is chosen as framework context for CDRH1 (SEQ ID NO 821), CDRH2 (SEQ ID NO 822) and CDRH3 (SEQ ID NO 823). Likewise human antibody germline VH sequence VH1 1-46 (http://vbase.mrc-cpe.cam.ac.uk/) is chosen as framework context for CDRH1 (SEQ ID NO 836), CDRH2 (SEQ ID NO 837) and CDRH3 (SEQ ID NO 838). For each human VH several degenerated oligonucleotides have to be synthesized that overlap in a terminal stretch of approximately 15-20 nucleotides. To this end every second primer is an antisense primer. For VH1 1-03 the following oligonucleotides are used:

5′CM1-VH-A-XhoI
(SEQ ID NO: 790)
CCA TGT CTC GAG TCT GGG SCT GAA STG RWG ARG CCT
GGG GCT TCA GTG AAA RTG TCC TGC ARG GCT TCG GGC
TAT ACC TTC
3′CM1-VH-B
(SEQ ID NO: 791)
AT CCA CTC AAG CCY TTG TCC AGG CSY CTG TYT AAC CCA
GTG CAA CCA GTA GCT GGT GAA GGT ATA GCC CGA AGC
5′CM1-VH-C
(SEQ ID NO: 792)
GG CTT GAG TGG ATK GGC ATG ATT GAT CCT TCC AAT AGT
GAC ACT AGG TTT AAT CCG AAC TTC AAG GAC
3′CM1-VH-D
(SEQ ID NO: 793)
GCT GCT GAG CWS CAT GTA GGC TGT GYT GGM AGA TST
GTC TMY AKT SAW TGT GRC CYT GTC CTT GAA GTT CGG
ATT
5′CM1-VH-E
(SEQ ID NO: 794)
GCC TAC ATG SWA CTC AGC AGC CTG ASA TCT GMG GAC
ACT GCA GTC TAT TAC TGT GCC ASA TAT GGT AGC TAC
GTT
3′CM1-VH-F-BstEII
(SEQ ID NO: 795)
CAT GTA GGT GAC CGA GGT TCC TTG ACC CCA GTA GTC
CAG AGG GGA AAC GTA GCT ACC ATA

[0878] For VH1 1-46 the oligonucleotides are as follows:

5′ CM3-VH-A-XhoI
(SEQ ID NO: 796)
CCA TGT CTC GAG TCT GGG RCT GAA STG RWG AAG CCT
GGG GCT TCA GTG AAG STG TCC TGC AAG GCT TCT
3′ CM3-VH-B
(SEQ ID NO: 797)
CTC AAG GCC TTG TCC AGG CSY CTG CYT CAC CCA GTG
TAT CCA GTA ACT GGT GAA GGT GTA GCC AGA AGC CTT
GCA GGA
5′ CM3-VH-C
(SEQ ID NO: 798)
CCT GGA CAA GGC CTT GAG TGG ATK GGA GAG ATT AAT
CCT AGC AGC GGT CGT ACTA AC TAC AAC GAG AAA TTC
3′ CM3-VH-D
(SEQ ID NO: 799)
C TGT GGA GGT AGA TKT GTC TMY AGT CAY TGT GAC CYT
GTT CTT GAA TTT CTC GTT GTA GTT
5′ CM3-VH-E
(SEQ ID NO: 800)
A TCT ACC TCC ACA GYC TAC ATG SAA CTC AGC ARC CTG
ASA TCT GAG GAC ACT GCG GTC TAT TAC TGT GCA
3′ CM3-VH-F-BstEII
(SEQ ID NO: 801)
CAT GTA GGT GAC CGT GGT GCC TTG GCC CCA GTA GCC
CCT WCT TGC ACA GTA ATA GAC CGC

[0879] Each of these primer sets spans over the whole corresponding VH sequence.

[0880] Within each set primers are mixed in equal amounts (e.g. 1 μl of each primer (primer stocks 20 to 100 μM) to a 20 μl PCR reaction) and added to a PCR mix consisting of PCR buffer, nucleotides and Taq polymerase. This mix is incubated at 94° C. for 3 minutes, 65° C. for 1 minute, 62° C. for 1 minute, 59° C. for 1 minute, 56° C. for 1 minute, 52° C. for 1 minute, 50° C. for 1 minute and at 72° C. for 10 minutes in a PCR cycler. Subsequently the product is run in an agarose gel electrophoresis and the product of a size from 200 to 400 isolated from the gel according to standard methods.

[0881] Each VH PCR product is then used as a template for a standard PCR reaction using primers that incorporate N-terminal and C-terminal suitable cloning restriction sites. The DNA fragment of the correct size (for a VH approximately 350 nucleotides) is isolated by agarose gel electrophoresis according to standard methods. In this way sufficient VH DNA fragment is amplified.

[0882] The human antibody germline VL sequence VkII O11 (http://vbase.mrc-cpe.cam.ac.uk/) is chosen as framework context for CDRL1 (SEQ ID NO 816), CDRL2 (SEQ ID NO 817) and CDRL3 (SEQ ID NO 818). Likewise human antibody germline VL sequence VkII A1 (http://vbase.mrc-cpe.cam.ac.uk/) is chosen as framework context for CDRL1 (SEQ ID NO 833), CDRL2 (SEQ ID NO 834) and CDRL3 (SEQ ID NO 835). For each human VL several degenerated oligonucleotides have to be synthesized that overlap in a terminal stretch of approximately 15-20 nucleotides. To this end every second primer is an antisense primer. Restriction sites needed for later cloning within the oligonucleotides are deleted. For VkII O11 the following oligonucleotides are used:

5′ CM1-VL-A-SacI
(SEQ ID NO: 802)
CCT GTA GAG CTC GTG ATG ACC CAG ACT CCA YYC TCC
CTA MCT GTG ACA SYT GGA GAG MMG GYT TCT RTC AGC
TGC AAG TCC AGT
3′ CM1-VL-B
(SEQ ID NO: 803)
GTA CCA GGC CAA GTA GTT CTT CTG ACT GCT AGT ATA
TAA AAG GGA CTG ACT GGA CTT GCA GCT GA
5′ CM1-VL-C
(SEQ ID NO: 804)
TAC TTG GCC TGG TAC CWG CAG AAA CCA GGT CAG TCT
CCT MAA CTG CTG ATT TAC TGG GCA TCC ACT AGG
3′ CM1-VL-D
(SEQ ID NO: 805)
GAG AGT GAA ATC TGT CCC AGA TCC ACT GCC TGA GAA
GCG ATC AGG GAC CCC AGA TTC CC TAGT GGA TGC CCA
GTA
5′ CM1-VL-E
(SEQ ID NO: 806)
ACA GAT TTC ACT CTC AMA ATC TCC AGW GTG RAG GCT
GAS GAC STG GSA GTT TAT TAC TGT CAG CAA TAT
3′ CM1-VL-F-BsiWI/SpeI
(SEQ ID NO: 807)
CCT CAG ACT AGT CGT ACG TTT GAT CTC CAA CTT TGT
GCC TCC ACC GAA CGT CCA CGG ATA GGC ATA ATA TTG
CTG ACA GTA ATA

[0883] For VkII A1 the oligonucleotides are as follows:

5′ CM3-VL-A-SacI
(SEQ ID NO: 808)
CCT GTA GAG CTC GTG ATG ACC CAA TCT CCA SYT TCT
TTG SCT GTG ACT CTA GGG CAG CSG GCC TCC ATC TCC
TGC
3′ CM3-VL-Ba
(SEQ ID NO: 809)
GAA CCA ACT CAT ATA ACT ACC ACC ATC ATA ATC AAC
ACT TTG GCT GGC CTT GCA GGA GAT GGA GGC
3′ CM3-VL-Bb
(SEQ ID NO: 810)
GAA CCA ACT CAT ATA ACT ACC ACC ATC ATA ATC AAC
ACT AGA TTG GCT GGC CTT GCA GGA GAT GGA GGC
5′ CM3-VL-C
(SEQ ID NO: 811)
AGT TAT ATG AGT TGG TTC CAA CAG AGA CCA GGA CAG
YCA CCC ARA CKC CTC ATC TMT GCT GCA TCC AAT CTA
3′ CM3-VL-D
(SEQ ID NO: 812)
GGT GAA GTC TGT CCC AGA GCC ACT GCC ACT AAA CCT
GKC TGG GAY CCC AGA TTC TAG ATT GGA TGC AGC
5′ CM3-VL-E
(SEQ ID NO: 813)
TCT GGG ACA GAC TTC ACC CTC AAK ATC YMT CST GTG
GAG GMG GAG GAT GTT GSA RYC TAT TACT GT CAG CAA
AGT
3′ CM3-VL-F-BsiWI/SpeI
(SEQ ID NO: 814)
CCT CAG ACT AGT CGT ACG TTT GAT CTC CAG CTT GGT
CCC CTG ACC GAA CGT GAG CGG ATC CTC ATA ACT TTG
CTG ACA GTA ATA

[0884] Each of these primer sets spans over the whole corresponding VL sequence.

[0885] Within each set primers are mixed in equal amounts (e.g. 1 μl of each primer (primer stocks 20 to 100 μM) to a 20 μl PCR reaction) and added to a PCR mix consisting of PCR buffer, nucleotides and Taq polymerase. This mix is incubated at 94° C. for 3 minutes, 65° C. for 1 minute, 62° C. for 1 minute, 59° C. for 1 minute, 56° C. for 1 minute, 52° C. for 1 minute, 50° C. for 1 minute and at 72° C. for 10 minutes in a PCR cycler. Subsequently the product is run in an agarose gel electrophoresis and the product of a size from 200 to 400 isolated from the gel according to standard methods.

[0886] Each VL PCR product is then used as a template for a standard PCR reaction using primers that incorporate N-terminal and C-terminal suitable cloning restriction sites. The DNA fragment of the correct size (for a VL approximately 330 nucleotides) is isolated by agarose gel electrophoresis according to standard methods. In this way sufficient VL DNA fragment is amplified.

[0887] The final VH1 1-03-based VH PCR product (i.e. the repertoire of human/humanized VH) is then combined with the final VkII O11-based VL PCR product (i.e. the repertoire of human/humanized VL) and the final VH1 1-46-based VH PCR product (i.e. the repertoire of human/humanized VH) with the final VkII A1-based VL PCR product (i.e. the repertoire of human/humanized VL) in the phage display vector pComb3H5Bhis to form two different libraries of functional scFvs from which—after display on filamentous phage—anti-C-MET binders are selected, screened, identified and confirmed as described in the following:

[0888] 450 ng of the light chain fragments (SacI-SpeI digested) are ligated with 1400 ng of the phagemid pComb3H5Bhis (SacI-SpeI digested; large fragment). The resulting combinatorial antibody library is then transformed into 300 μl of electrocompetent Escherichia coli XL1 Blue cells by electroporation (2.5 kV, 0.2 cm gap cuvette, 25 μFD, 200 Ohm, Biorad gene-pulser) resulting in a library size of more than 10⁷ independent clones. After one hour of phenotype expression, positive transformants are selected for carbenicilline resistance encoded by the pComb3H5BHis vector in 100 ml of liquid super broth (SB)-culture over night. Cells are then harvested by centrifugation and plasmid preparation is carried out using a commercially available plasmid preparation kit (Qiagen).

[0889] 2800 ng of this plasmid-DNA containing the VL-library (XhoI-BstEII digested; large fragment) are ligated with 900 ng of the heavy chain V-fragments (XhoI-BstEII digested) and again transformed into two 300 μl aliquots of electrocompetent E. coli XL1 Blue cells by electroporation (2.5 kV, 0.2 cm gap cuvette, 25 μFD, 200 Ohm) resulting in a total VH-VL scFv (single chain variable fragment) library size of more than 10⁷ independent clones.

[0890] After phenotype expression and slow adaptation to carbenicillin, the E. coli cells containing the antibody library are transferred into SB-carbenicillin (SB with 50 μg/mL carbenicillin) selection medium. The E. coli cells containing the antibody library are then infected with an infectious dose of 10¹² particles of helper phage VCSM13 resulting in the production and secretion of filamentous M13 phage, wherein each phage particle contains single stranded pComb3H5BHis-DNA encoding a scFv-fragment and displays the corresponding scFv-protein as a translational fusion to phage coat protein III. This pool of phages displaying the antibody library is used for the selection of antigen binding entities.

[0891] For this purpose the phage library carrying the cloned scFv-repertoire is harvested from the respective culture supernatant by PEG8000/NaCl precipitation and centrifugation. Approximately 10¹¹ to 10¹² scFv phage particles are resuspended in 0.4 ml of PBS/0.1% BSA and incubated with 10⁵ to 10⁷ C-MET transfected CHO cells (see example 26.1) for 1 hour on ice under slow agitation. These C-MET transfected CHO cells are harvested beforehand by centrifugation, washed in PBS and resuspended in PBS/1% FCS (containing Na Azide). scFv phage which do not specifically bind to the C-MET transfected CHO cells are eliminated by up to five washing steps with PBS/1% FCS (containing Na Azide). After washing, binding entities are eluted from the cells by resuspending the cells in HCl-glycine pH 2.2 (10 min incubation with subsequent vortexing) and after neutralization with 2 M Tris pH 12, the eluate is used for infection of a fresh uninfected E. coli XL1 Blue culture (OD600>0.5). The E. coli culture containing E. coli cells successfully transduced with a phagemid copy, encoding a human/humanized scFv-fragment, are again selected for carbenicillin resistance and subsequently infected with VCMS 13 helper phage to start the second round of antibody display and in vitro selection. A total of 4 to 5 rounds of selections are carried out, normally.

[0892] In order to screen for C-MET specific binders plasmid DNA corresponding to 4 and 5 rounds of panning is isolated from E. coli cultures after selection. For the production of soluble scFv-protein, VH-VL-DNA fragments are excised from the plasmids (XhoI-SpeI). These fragments are cloned via the same restriction sites into the plasmid pComb3H5BFlag/His differing from the original pComb3H5BHis in that the expression construct (e.g. scFv) includes a Flag-tag (DYKDDDDK) between the scFv and the His6-tag and the additional phage proteins are deleted. After ligation, each pool (different rounds of panning) of plasmid DNA is transformed into 100 μl heat shock competent E. coli TG1 or XLI blue and plated onto carbenicillin LB-agar. Single colonies are picked into 100 μl of LB carb (LB with 50 μg/ml carbenicillin).

[0893] E. coli transformed with pComb3H5BHis containing a VL- and VH-segment produce soluble scFv in sufficient amounts after excision of the gene III fragment and induction with 1 mM IPTG. Due to a suitable signal sequence, the scFv is exported into the periplasma where it folds into a functional conformation.

[0894] Single E. coli TG1 bacterial colonies from the transformation plates are picked for periplasmic small scale preparations and grown in SB-medium (e.g. 10 ml) supplemented with 20 mM MgCl₂ and carbenicillin 50 μg/ml (and re-dissolved in PBS (e.g. 1 ml) after harvesting. A temperature shock is applied by four rounds of freezing at −70° C. and thawing at 37° C. whereby the outer membrane of the bacteria is destroyed and the soluble periplasmic proteins including the scFvs are released into the supernatant. After elimination of intact cells and cell-debris by centrifugation, the supernatant containing the anti-C-MET scFvs is collected and used for the identification of C-MET specific binders as follows:

[0895] Binding of scFvs to C-MET is tested by flow cytometry on C-MET transfected CHO cells (see example 247.1); untransfected CHO cells are use as negative control.

[0896] For flow cytometry 2.5×10⁵ cells are incubated with 50 μl of scFv periplasmic preparation or with 5 μg/ml of purified scFv in 50 μl PBS with 2% FCS. The binding of scFv is detected with an anti-His antibody (Penta-His Antibody, BSA free, Qiagen GmbH, Hilden, FRG) at 2 μg/ml in 50 μl PBS with 2% FCS. As a second step reagent a R-Phycoerythrin-conjugated affinity purified F(ab′)2 fragment, goat anti-mouse IgG (Fc-gamma fragment specific), diluted 1:100 in 50 μl PBS with 2% FCS (Dianova, Hamburg, FRG) is used. The samples are measured on a FACSscan (BD biosciences, Heidelberg, FRG).

[0897] Single clones are then analyzed for favourable properties and amino acid sequence. C-MET specific scFvs are converted into recombinant bispecific single chain antibodies by joining them via a Gly₄Ser₁-linker with the CD3 specific scFv I2C (SEQ ID: 185) or any other CD3 specific scFv of the invention to result in constructs with the domain arrangement VH_{C-MET}-(Gly₄Ser₁)₃ Ser₁Gly₄Ser₁-VH_{CD3}-(Gly₄Ser₁)₃-VL_{CD3} or alternative domain arrangements. For expression in CHO cells the coding sequences of (i) an N-terminal immunoglobulin heavy chain leader comprising a start codon embedded within a Kozak consensus sequence and (ii) a C-terminal His₆-tag followed by a stop codon are both attached in frame to the nucleotide sequence encoding the bispecific single chain antibodies prior to insertion of the resulting DNA-fragment as obtained by gene synthesis into the multiple cloning site of the expression vector pEF-DHFR (Raum et al. Cancer Immunol Immunother 50 (2001) 141-150). Transfection of the generated expression plasmids, protein expression and purification of cross-species specific bispecific antibody constructs are performed as described in Examples 26.3 and 26.4. All other state of the art procedures are carried out according to standard protocols (Sambrook, Molecular Cloning; A Laboratory Manual, 3rd edition, Cold Spring Harbour Laboratory Press, Cold Spring Harbour, New York (2001)).

[0898] Identification of functional bispecific single-chain antibody constructs is carried out by flow cytometric binding analysis of culture supernatant from transfected cells expressing the cross-species specific bispecific antibody constructs. Analysis is performed as described in Example 26.5 except that in addition C-MET transfected CHO cells as described in examples 26.1 and 26.2 are used.

[0899] Only those constructs showing bispecific binding to human and macaque CD3 as well as to C-MET are selected for further use.

[0900] Cytotoxic activity of the generated cross-species specific bispecific single chain antibody constructs against C-MET positive target cells elicited by effector cells is analyzed as described in Example 26.6 except that in addition C-MET transfected CHO cells as described in examples 26.1 and 26.2 are used as target cells and the macaque T cell line 4119LnPx is used as effector cells. Only those constructs showing potent recruitment of cytotoxic activity of effector cells against cells positive for C-MET are selected for further use.

27. Generation and Characterization of Additional cMET and CD3 Cross-Species Specific Bispecific Single Chain Molecules
27.1 Generation of CHO Cells with Enhanced Expression of Human cMET and CHO Cells with Enhanced Expression of Macaque cMET Extracellular Domains

[0901] The modified coding sequences of human cMET and macaque cMET as described above were used for the construction of artificial cDNA sequences encoding fusion proteins of the extracellular domains of human cMET and macaque cMET, respectively, with a truncated variant of human EpCAM. To generate a construct for expression of these cMET fusion proteins cDNA fragments were obtained by gene synthesis according to standard protocols (the cDNA and amino acid sequence of the constructs is listed under SEQ ID NOs 767 and 777 for human cMET and SEQ ID NOs 788 and 789 for macaque cMET). The gene synthesis fragments were designed as to contain first a Kozak site for eukaryotic expression of the construct, followed by the coding sequence of a 19 amino acid immunoglobulin leader peptide, followed in frame by the coding sequence of the human cMET or macaque cMET protein from amino acid 1 to 908 of the mature protein corresponding to the extracellular domains of human cMET and macaque cMET, respectively, followed in frame by the coding sequence of an artificial Ser₁-Gly₄-Ser₁-Gly₁-linker, followed in frame by the coding sequence of the transmembrane domain and intracellular domain of human EpCAM (as published in GenBank; Accession number NM_002354; amino acids 266 to 314 [as counted from the start codon] except for a point mutation at position 279 with isoleucine instead of valine) and a stop codon. The gene synthesis fragments were also designed as to introduce restriction sites at the beginning and at the end of the fragment. The introduced restriction sites, EcoRI at the 5′ end and SalI at the 3′ end, were utilized in the following cloning procedures. The gene synthesis fragments were cloned via EcoRI and SalI into a plasmid designated pEF-DHFR (pEF-DHFR is described in Raum et al. Cancer Immunol Immunother 50 (2001) 141-150) following standard protocols. Clones with sequence-verified nucleotide sequence were transfected into DHFR deficient CHO cells for eukaryotic expression of the constructs. Eukaryotic protein expression in DHFR deficient CHO cells was performed as described by Kaufmann R. J. (1990) Methods Enzymol. 185, 537-566. Gene amplification of the constructs was induced by increasing concentrations of methotrexate (MTX) to a final concentration of up to 20 nM MTX.

27.2 Generation of cMET and CD3 Cross-Species Specific Bispecific Single Chain Molecules

### Cloning of Cross-Species Specific Binding Molecules

[0902] Bispecific single chain antibody molecules, with a binding specificity cross-species specific for human and non-chimpanzee primate CD3epsilon as well as a binding specificity cross-species specific for human and non-chimpanzee primate cMET, were designed as set out in the following Table 10:

TABLE 10
Formats of anti-CD3 and anti-cMET cross-species
specific bispecific single chain antibody molecules

| SEQ ID | Formats of protein constructs |
|---|---|
| (nucl/prot) | (N → C) |
| 1413/1412/ | ME86H11HLxI2CHL |
| 1427/1426/ | ME62A12HLxI2CHL |
| 1441/1440 | ME63F2HLxI2CHL |
| 1455/1454 | ME62D11HLxI2CHL |
| 1469/1468 | ME62C10HLxI2CHL |
| 1483/1482 | ME62A4HLxI2CHL |

[0903] Generation, expression and purification of these cross-species specific bispecific single chain molecules was performed as described above.

[0904] The flow cytometric binding analysis of the cMET and CD3 cross-species specific bispecific antibodies was performed as described above. The bispecific binding of the single chain molecules listed above, which are cross-species specific for cMET and cross-species specific for human and non-chimpanzee primate CD3 was clearly detectable as shown in FIG. 54. In the FACS analysis all constructs showed binding to CD3 and cMET compared to the negative control. Cross-species specificity of the bispecific antibodies to human and macaque CD3 and cMET antigens was demonstrated. Analysis of bioactivity by chromium 51 (⁵¹Cr) release in vitro cytotoxicity assays is performed as described above. Based on demonstrated cross-species specific bispecific binding and recruited cytotoxicity cross-species specific binding molecules are selected for further use.

27.3 Generation and Flow Cytometric Binding Analysis of Cross-Species Specific Single Chain Antibody Fragments (scFv) Binding to cMET

[0905] scFv cross-species specific for cMET were generated as described above and designated as set out in the following Table 11:

TABLE 11
Designation of cross-species specific single chain antibody fragments

| SEQ ID | |
|---|---|
| (nucl/prot) | Designation |
| 1649/1648 | ME06F2HL |
| 1635/1634 | ME06E10HL |
| 1621/1620 | ME06D2HL |
| 1607/1606 | ME06D1HL |
| 1579/1578 | ME06C7HL |
| 1565/1564 | ME06C6HL |
| 1593/1592 | ME06B7HL |
| 1551/1550 | ME05F6HL |
| 1523/1522 | ME05D7HL |
| 1537/1536 | ME05B7HL |
| 1509/1508 | ME99B1HL |
| 1495/1494 | ME75H6HL |

[0906] The flow cytometric binding analysis of periplasmic preparations containing scFv cross-species specific for cMET using CHO cells expressing human cMET as described in Example 27.1 and CHO cells expressing macaque cMET as described in Example 27.1 was performed as described above. The binding of the scFv listed above, which are cross-species specific for cMET was clearly detectable as shown in FIG. 56. In the FAGS analysis all constructs showed binding to cMET compared to the negative control. Cross-species specificity of the scFv antibodies to human and macaque cMET antigens was demonstrated.

[0907] Cloning of cross-species specific binding molecules based on the scFvs and expression and purification of these cross-species specific bispecific single chain molecules is performed as described above. Flow cytometric analysis of cross-species specific bispecific binding and analysis of bioactivity by chromium 51 (⁵¹Cr) release in vitro cytotoxicity assays is performed as described above. Based on demonstrated cross-species specific bispecific binding and recruited cytotoxicity cross-species specific binding molecules are selected for further use.

[0908] Human/humanized equivalents of non-human scFvs cross-species specific for cMET contained in the selected cross-species specific bispecific single chain molecules are generated as described herein. Cloning of cross-species specific binding molecules based on these human/humanized scFvs and expression and purification of these cross-species specific bispecific single chain molecules is performed as described above. Flow cytometric analysis of cross-species specific bispecific binding and analysis of bioactivity by chromium 51 (⁵¹Cr) release in vitro cytotoxicity assays is performed as described above. Based on demonstrated cross-species specific bispecific binding and recruited cytotoxicity cross-species specific binding molecules are selected for further use.

### 28. Generation and Characterization of Endosialin and CD3 Cross-Species Specific Bispecific Single Chain Antibody Molecules

### 28.1 Generation of CHO Cells Expressing Human Endosialin

[0909] The coding sequence of human Endosialin as published in GenBank (Accession number NM_020404) was obtained by gene synthesis according to standard protocols. The gene synthesis fragment was designed as to contain first a Kozak site for eukaryotic expression of the construct, followed by the coding sequence of human Endosialin, followed in frame by the coding sequence of a FLAG tag and a stop codon (the cDNA and amino acid sequence of the construct is listed under SEQ ID Nos 913 and 914). The gene synthesis fragment was also designed as to introduce restriction sites at the beginning and at the end of the fragment. The introduced restriction sites, EcoRI at the 5′ end and XbaI at the 3′ end, were utilised in the following cloning procedures. The gene synthesis fragment was cloned via EcoRI and XbaI into a plasmid designated pEF-DHFR (pEF-DHFR is described in Raum et al. Cancer Immunol Immunother 50 (2001) 141-150) following standard protocols. The aforementioned procedures were carried out according to standard protocols (Sambrook, Molecular Cloning; A Laboratory Manual, 3rd edition, Cold Spring Harbour Laboratory Press, Cold Spring Harbour, New York (2001)). A clone with sequence-verified nucleotide sequence was transfected into DHFR deficient CHO cells for eukaryotic expression of the construct. Eukaryotic protein expression in DHFR deficient CHO cells was performed as described by Kaufmann R. J. (1990) Methods Enzymol. 185, 537-566. Gene amplification of the construct was induced by increasing concentrations of methotrexate (MTX) to a final concentration of up to 20 nM MTX.

### 28.2 Generation of CHO Cells Expressing Macaque Endosialin

[0910] The cDNA sequence of macaque Endosialin was obtained by a set of 2 PCRs on cDNA from macaque monkey (cynomolgus) colon prepared according to standard protocols. The following reaction conditions: 1 cycle at 95° C. for 5 minutes followed by 40 cycles with 95° C. for 45 seconds, 50° C. for 45 seconds and 72° C. for 2 minutes followed by a terminal cycle of 72° C. for 5 minutes and the following primers were used for the first PCR:

forward primer:
SEQ ID NO 917
5′-atatgaattcgccaccatgctgctgcgcctgttgctggcc-3′
reverse primer:
SEQ ID NO 918
5′-gtcttcatcttcctcatcctcccc-3′

[0911] The following reaction conditions: 1 cycle at 95° C. for 5 minutes followed by 40 cycles with 95° C. for 45 seconds, 58° C. for 45 seconds and 72° C. for 2 minutes followed by a terminal cycle of 72° C. for 5 minutes and the following primers were used for the second PCR:

forward primer:
SEQ ID NO 919
5′-gtcaactacgttggtggcttcgagtg-3′
reverse primer:
SEQ ID NO 920
5′-ggtctagatcacttatcgtcatcatctttgtagtccacgctggttct
gcaggtctgc-3′

[0912] The PCR reactions were performed under addition of PCR grade betain to a final concentration of 1 M. Those PCRs generated two overlapping fragments, which were isolated and sequenced according to standard protocols using the PCR primers, and thereby provided a portion of the cDNA sequence coding macaque Endosialin from codon 9 of the leader peptide to codon 733 of the mature protein. To generate a construct for expression of macaque Endosialin a cDNA fragment was obtained by gene synthesis according to standard protocols (the cDNA and amino acid sequence of the construct is listed under SEQ ID Nos 915 and 916). In this construct the coding sequence of macaque Endosialin from amino acid 9 of the leader peptide to amino acid 733 of the mature Endosialin protein, followed in frame by the coding sequence of amino acid 734 to the last amino acid of the mature human Endosialin protein, followed in frame by the coding sequence of a FLAG tag and a stop codon was fused in frame to the coding sequence of the amino acids 1 to 8 of the leader peptide of the human Endosialin protein. The gene synthesis fragment was also designed as to contain a Kozak site for eukaryotic expression of the construct and restriction sites at the beginning and the end of the fragment containing the cDNA. The introduced restriction sites, EcoRI at the 5′ end and XbaI at the 3′ end, were utilised in the following cloning procedures. The gene synthesis fragment was cloned via EcoRI and XbaI into a plasmid designated pEF-DHFR (pEF-DHFR is described in Raum et al. Cancer Immunol Immunother 50 (2001) 141-150) following standard protocols. The aforementioned procedures were carried out according to standard protocols (Sambrook, Molecular Cloning; A Laboratory Manual, 3rd edition, Cold Spring Harbour Laboratory Press, Cold Spring Harbour, New York (2001)). A clone with sequence-verified nucleotide sequence was transfected into DHFR deficient CHO cells for eukaryotic expression of the construct. Eukaryotic protein expression in DHFR deficient CHO cells was performed as described by Kaufmann R. J. (1990) Methods Enzymol. 185, 537-566. Gene amplification of the construct was induced by increasing concentrations of methotrexate (MTX) to a final concentration of up to 20 nM MTX.

28.3 Cross-Species Specific Binding to Endosialin of a scFv-Antibody Fragment

[0913] The cDNA of a scFv-antibody fragment was obtained by gene synthesis according to standard protocols. The cDNA fragment was cloned via suitable restriction sites into the plasmid pComb3H5BFlag/His differing from the original pComb3H5BHis (described below) in that the expression construct (e.g. scFv) includes a Flag-tag (DYKDDDDK SEQ ID NO 933) between the scFv-fragment and the His6-tag and the additional phage proteins are deleted. After ligation, a sequence verified clone of the plasmid DNA was transformed into 100 μl heat shock competent E. coli TG1 or XLI blue and plated onto carbenicillin LB-agar. Single colonies were picked into 100 μl of LB carb (LB with 50 μg/ml carbenicillin).

[0914] After induction with 1 mM IPTG E. coli transformed with pComb3H5BFlag/His containing the coding sequence of the cross-species specific single-chain antibody produced soluble scFv in sufficient amounts. Due to a suitable signal sequence, the scFv-chain is exported into the periplasma where it folds into a functional conformation.

[0915] Single E. coli bacterial colonies from the transformation plates were picked for periplasmic small scale preparations and grown in SB-medium (e.g. 10 nil) supplemented with 20 mM MgCl₂ and carbenicillin 50 μg/ml (and re-dissolved in PBS (e.g. 1 ml) after harvesting. A temperature shock was applied by four rounds of freezing at −70′C and thawing at 37′C whereby the outer membrane of the bacteria is destroyed and the soluble periplasmic proteins including the scFv-molecules are released into the supernatant. After elimination of intact cells and cell-debris by centrifugation the supernatant containing the scFv-antibody fragment was collected and used in the subsequent flow cytometric binding analysis with the CHO cells transfected with human Endosialin as described in Example 28.1 and the macaque Endosialin transfectant described in Example 28.2.

[0916] To this end 200.000 cells of the respective cell lines were incubated for 30 min on ice with 50 μl of the periplasmic preparation containing the cross-species specific single-chain antibody. The cells were washed twice in PBS with 2% FCS and binding of the construct was detected with a murine Penta His antibody (Qiagen; diluted 1:20 in 50 μl PBS with 2% FCS). After washing, bound anti His antibodies were detected with an Fc gamma-specific antibody (Dianova) conjugated to phycoerythrin, diluted 1:100 in PBS with 2% FCS. Untransfected CHO cells were used as a negative control.

[0917] Flow cytometry was performed on a FACS-Calibur apparatus, the CellQuest software was used to acquire and analyze the data (Becton Dickinson biosciences, Heidelberg). FACS staining and measuring of the fluorescence intensity were performed as described in Current Protocols in Immunology (Coligan, Kruisbeek, Margulies, Shevach and Strober, Wiley-Interscience, 2002).

[0918] As shown in FIG. 46, specific binding of the scFv-antibody fragment to both, human and macaque Endosialin could be demonstrated compared to the negative control.

### 28.4 Generation of Endosialin and CD3 Cross-Species Specific Bispecific Single Chain Molecules

[0919] The human antibody germline VH sequence VH1 1-03 (http://vbase.mrc-cpe.cam.ac.uk/) is chosen as framework context for CDRH1 (SEQ ID 910), CDRH2 (SEQ ID 911) and CDRH3 (SEQ ID 912). For the human VH several degenerated oligonucleotides have to be synthesized that overlap in a terminal stretch of approximately 15-20 nucleotides. To this end every second primer is an antisense primer. For VH1 1-03 the following set of oligonucleotides is used:

5′ED-VH-A-XhoI
SEQ ID NO 921
CCA GCT CTC GAG TCA GGA SCT GAG STG RWG AAG CCT
GGG GCT TCA GTG AAG RTG TCC TGC AAG GCT TCT GGA
TAC ACA TTC ACT
3′ED-VH-B
SEQ ID NO 922
AAT ATA TCC MAT CCA CTC AAG GCK CTK TCC AKK TSY
CTG CYT CAY CCA GTG TAT AAC ATA GTC AGT GAA TGT
GTA TCC AGA
5′ED-VH-C
SEQ ID NO 923
CTT GAG TGG ATK GGA TAT ATT AAT CCT TAT GAT GAT
GAT ACTA CC TAC AAC CAG AAG TTC AAG GGC
3′ED-VH-D
SEQ ID NO 924
T GAG CTS CAT GTA GGC TGT GYT GGM GGA TKT GWC TMS
AGT MAW TGT GRC CYG GCC CTT GAA CTT CTG GTT
5′ED-VH-E
SEQ ID NO 925
C ACA GCC TAC ATG SAA CTC ARC AGC CTG ASA TCT GAG
GAC ACT GCA GTC TAT TAC TGT GCA AGA AGG GGG
3′ED-VH-F-BstEII
SEQ ID NO: 926
CCT GAT GGT GAC CAA GGT TCC TTG ACC CCA GTA GTC
CAT AGA ATA GTC GAA GTA ACC ATC ATA GGA GTT CCC
CCT TCT TGC ACA GTA

[0920] This primer set spans over the whole corresponding VH sequence.

[0921] Within the set primers are mixed in equal amounts (e.g. 1 μl of each primer (primer stocks 20 to 100 μM) to a 20 μl PCR reaction) and added to a PCR mix consisting of PCR buffer, nucleotides and Taq polymerase. This mix is incubated at 94° C. for 3 minutes, 65° C. for 1 minute, 62° C. for 1 minute, 59° C. for 1 minute, 56° C. for 1 minute, 52° C. for 1 minute, 50° C. for 1 minute and at 72° C. for 10 minutes in a PCR cycler. Subsequently the product is run in an agarose gel electrophoresis and the product of a size from 200 to 400 isolated from the gel according to standard methods.

[0922] The VH PCR product is then used as a template for a standard PCR reaction using primers that incorporate N-terminal and C-terminal suitable cloning restriction sites. The DNA fragment of the correct size (for a VH approximately 350 nucleotides) is isolated by agarose gel electrophoresis according to standard methods. In this way sufficient VH DNA fragment is amplified.

[0923] The human antibody germline VL sequence VkI L8 (http://vbase.mrc-cpe.cam.ac.uk/) is chosen as framework context for CDRL1 (SEQ ID 907), CDRL2 (SEQ ID 908) and CDRL3 (SEQ ID 909). For the human VL several degenerated oligonucleotides have to be synthesized that overlap in a terminal stretch of approximately 15-20 nucleotides. To this end every second primer is an antisense primer. Restriction sites needed for later cloning within the oligonucleotides are deleted. For VkI L8 the following oligonucleotides are used:

5′ED-VL-A-SacI
(SEQ ID NO 927)
CCA GTC GAG CTC CAG CTG ACC CAG TCT CMA ARM TTC
MTG TCC RCA TCA GTA GGA GAC AGA GTC NNS ATC ACC
TGC AGG GCC AG
3′ED-VL-B
(SEQ ID NO 928)
TCC TGG TTT CTG TTG ATA CCA GGC TAC AGC AGT ACC
CAC ATT CTG ACT GGC CCT GCA GGT GAT
5′ED-VL-C
(SEQ ID NO 929)
TAT CAA CAG AAA CCA GGA MAA KCC CCT AAA TTA CTG
ATT TACT CG GCA TCG AAT CGG TAC ACT GGA GTC CCT
3′ED-VL-D
(SEQ ID NO 930)
GCT GAT GGT GAG AGT GAA MTC TGT CCC AGA TCC ACT
GCC TGA GAA GCG AYY AGG GAC TCC AGT GTA CCG
5′ED-VL-E
(SEQ ID NO 931)
TTC ACT CTC ACC ATC AGC ART MTG CAG YCT GAA GAC
YTS GCA RMT TAT TWC TGC CAG CAA TAT ACC AAC
3′ED-VL-F-BsiWI/SpeI
(SEQ ID NO 932)
CCT GAT ACT AGT CGT ACG TTT TAT TTC CAG CTT GGT
CCC CTG TCC AAA CGT ATA CAT GGG ATA GTT GGT ATA
TTG CTG GCA

[0924] This primer set spans over the whole corresponding VL sequence.

[0925] Within the set primers are mixed in equal amounts (e.g. 1 μl of each primer (primer stocks 20 to 100 μM) to a 20 μl PCR reaction) and added to a PCR mix consisting of PCR buffer, nucleotides and Taq polymerase. This mix is incubated at 94° C. for 3 minutes, 65° C. for 1 minute, 62° C. for 1 minute, 59° C. for 1 minute, 56° C. for 1 minute, 52° C. for 1 minute, 50° C. for 1 minute and at 72° C. for 10 minutes in a PCR cycler. Subsequently the product is run in an agarose gel electrophoresis and the product of a size from 200 to 400 isolated from the gel according to standard methods.

[0926] The VL PCR product is then used as a template for a standard PCR reaction using primers that incorporate N-terminal and C-terminal suitable cloning restriction sites. The DNA fragment of the correct size (for a VL approximately 330 nucleotides) is isolated by agarose gel electrophoresis according to standard methods. In this way sufficient VL DNA fragment is amplified.

[0927] The final VH1 1-03-based VH PCR product (i.e. the repertoire of human/humanized VH) is then combined with the final VkI L8-based VL PCR product (i.e. the repertoire of human/humanized VL) in the phage display vector pComb3H5Bhis to form a library of functional scFvs from which—after display on filamentous phage—anti-Endosialin binders are selected, screened, identified and confirmed as described in the following:

[0928] 450 ng of the light chain fragments (SacI-SpeI digested) are ligated with 1400 ng of the phagemid pComb3H5Bhis (SacI-SpeI digested; large fragment). The resulting combinatorial antibody library is then transformed into 300 μl of electrocompetent Escherichia coli XL1 Blue cells by electroporation (2.5 kV, 0.2 cm gap cuvette, 25 μFD, 200 Ohm, Biorad gene-pulser) resulting in a library size of more than 10⁷ independent clones. After one hour of phenotype expression, positive transformants are selected for carbenicillin resistance encoded by the pComb3H5BHis vector in 100 ml of liquid super broth (SB)-culture over night. Cells are then harvested by centrifugation and plasmid preparation is carried out using a commercially available plasmid preparation kit (Qiagen).

[0929] 2800 ng of this plasmid-DNA containing the VL-library (XhoI-BstEII digested; large fragment) are ligated with 900 ng of the heavy chain V-fragments (XhoI-BstEII digested) and again transformed into two 300 μl aliquots of electrocompetent E. coli XL1 Blue cells by electroporation (2.5 kV, 0.2 cm gap cuvette, 25 μFD, 200 Ohm) resulting in a total VH-VL scFv (single chain variable fragment) library size of more than 10⁷ independent clones.

[0930] After phenotype expression and slow adaptation to carbenicillin, the E. coli cells containing the antibody library are transferred into SB-carbenicillin (SB with 50 μg/mL carbenicillin) selection medium. The E. coli cells containing the antibody library are then infected with an infectious dose of 10¹² particles of helper phage VCSM13 resulting in the production and secretion of filamentous M13 phage, wherein each phage particle contains single stranded pComb3H5BHis-DNA encoding a scFv-fragment and displays the corresponding scFv-protein as a translational fusion to phage coat protein III. This pool of phages displaying the antibody library is used for the selection of antigen binding entities.

[0931] For this purpose the phage library carrying the cloned scFv-repertoire is harvested from the respective culture supernatant by PEG8000/NaCl precipitation and centrifugation. Approximately 10¹¹ to 10¹² scFv phage particles are resuspended in 0.4 ml of PBS/0.1% BSA and incubated with 10⁵ to 10⁷ Endosialin transfected CHO cells (see example 28.1) for 1 hour on ice under slow agitation. These Endosialin transfected CHO cells are harvested beforehand by centrifugation, washed in PBS and resuspended in PBS/1% FCS (containing Na Azide). scFv phage which do not specifically bind to the Endosialin transfected CHO cells are eliminated by up to five washing steps with PBS/1% FCS (containing Na Azide). After washing, binding entities are eluted from the cells by resuspending the cells in HCl-glycine pH 2.2 (10 min incubation with subsequent vortexing) and after neutralization with 2 M Tris pH 12, the eluate is used for infection of a fresh uninfected E. coli XL1 Blue culture (OD600>0.5). The E. coli culture containing E. coli cells successfully transduced with a phagemid copy, encoding a human/humanized scFv-fragment, are again selected for carbenicillin resistance and subsequently infected with VCMS 13 helper phage to start the second round of antibody display and in vitro selection. A total of 4 to 5 rounds of selections are carried out, normally.

[0932] In order to screen for Endosialin specific binders plasmid DNA corresponding to 4 and 5 rounds of panning is isolated from E. coli cultures after selection. For the production of soluble scFv-protein, VH-VL-DNA fragments are excised from the plasmids (XhoI-SpeI). These fragments are cloned via the same restriction sites into the plasmid pComb3H5BFlag/His differing from the original pComb3H5BHis in that the expression construct (e.g. scFv) includes a Flag-tag (DYKDDDDK) between the scFv and the His6-tag and the additional phage proteins are deleted. After ligation, each pool (different rounds of panning) of plasmid DNA is transformed into 100 μl heat shock competent E. coli TG1 or XLI blue and plated onto carbenicillin LB-agar. Single colonies are picked into 100 μl of LB carb (50 μg/ml).

[0933] After induction with 1 mM IPTG E. coli transformed with pComb3H5BFlag/His containing a VL- and VH-segment produce soluble scFv in sufficient amounts. Due to a suitable signal sequence, the scFv-chain is exported into the periplasma where it folds into a functional conformation.

[0934] Single E. coli TG1 bacterial colonies from the transformation plates are picked for periplasmic small scale preparations and grown in SB-medium (e.g. 10 nil) supplemented with 20 mM MgCl₂ and carbenicillin 50 μg/ml (and re-dissolved in PBS (e.g. 1 nil) after harvesting. A temperature shock is applied by four rounds of freezing at −70° C. and thawing at 37° C. whereby the outer membrane of the bacteria is destroyed and the soluble periplasmic proteins including the scFvs are released into the supernatant. After elimination of intact cells and cell-debris by centrifugation, the supernatant containing the anti-Endosialin scFvs is collected and used for the identification of Endosialin specific binders as follows: Binding of scFvs to Endosialin is tested by flow cytometry on Endosialin transfected CHO cells (see example 28.1); untransfected CHO cells are use as negative control. For flow cytometry 2.5×10⁵ cells are incubated with 50 μl of scFv periplasmic preparation or with 5 μg/ml of purified scFv in 50 μl PBS with 2% FCS. The binding of scFv is detected with an anti-His antibody (Penta-His Antibody, BSA free, Qiagen GmbH, Hilden, FRG) at 2 μg/ml in 50 μl PBS with 2% FCS. As a second step reagent a R-Phycoerythrin-conjugated affinity purified F(ab′)2 fragment, goat anti-mouse IgG (Fc-gamma fragment specific), diluted 1:100 in 50 μl PBS with 2% FCS (Dianova, Hamburg, FRG) is used. The samples are measured on a FACSscan (BD biosciences, Heidelberg, FRG).

[0935] Single clones are then analyzed for favourable properties and amino acid sequence. Endosialin specific scFvs are converted into recombinant bispecific single chain antibodies by joining them via a Gly4Ser1-linker with the CD3 specific scFv I2C (SEQ ID NO: 185) or any other CD3 specific scFv of the invention to result in constructs with the domain arrangement VH Endosialin—(Gly4Ser1)3-VL Endosialin-Ser1 Gly4Ser1-VHCD3-(Gly4Ser1)3-VLCD3 or alternative domain arrangements. For expression in CHO cells the coding sequences of (i) an N-terminal immunoglobulin heavy chain leader comprising a start codon embedded within a Kozak consensus sequence and (ii) a C-terminal His6-tag followed by a stop codon are both attached in frame to the nucleotide sequence encoding the bispecific single chain antibodies prior to insertion of the resulting DNA-fragment as obtained by gene synthesis into the multiple cloning site of the expression vector pEF-DHFR (Raum et al. Cancer Immunol Immunother 50 (2001) 141-150). A clone with sequence-verified nucleotide sequence is transfected into DHFR deficient CHO cells for eukaryotic expression of the construct. Eukaryotic protein expression in DHFR deficient CHO cells is performed as described by Kaufmann R. J. (1990) Methods Enzymol. 185, 537-566. Gene amplification of the construct is induced by increasing concentrations of methotrexate (MTX) to a final concentration of up to 20 nM MTX.

### 28.5 Expression and Purification of Bispecific Single Chain Antibody Molecules

[0936] Bispecific single chain antibody molecules are expressed in Chinese hamster ovary cells (CHO or HEK 293 cells as described herein above for the MCSP×CD3 bispecific single chain antibodies.

[0937] The isolation and analysis of the expressed bispecific single chain antibodies has also been described herein above in Example 9.

### 28.6 Flow Cytometric Binding Analysis of the Endosialin and CD3 Cross-Species Specific Bispecific Antibodies

[0938] In order to test the functionality of cross-species specific bispecific antibody constructs regarding the capability to bind to human and macaque Endosialin and CD3, respectively, a FACS analysis is performed. For this purpose CHO cells transfected with human Endosialin as described in Example 28.1 and the human CD3 positive T cell leukemia cell line HPB-ALL (DSMZ, Braunschweig, ACC483) are used to test the binding to human antigens. The binding reactivity to macaque antigens is tested by using the generated macaque Endosialin transfectant described in Example 28.2 and a macaque T cell line 4119LnPx (kindly provided by Prof Fickenscher, Hygiene Institute, Virology, Erlangen-Nuernberg; published in Knappe A, et al., and Fickenscher H., Blood 2000, 95, 3256-61). 200.000 cells of the respective cell lines are incubated for 30 min on ice with 50 μl of cell culture supernatant of transfected cells expressing the cross-species specific bispecific antibody constructs. The cells are washed twice in PBS with 2% FCS and binding of the construct is detected with a murine Penta His antibody (Qiagen; diluted 1:20 in 50 μl PBS with 2% FCS). After washing, bound anti His antibodies are detected with an Fc gamma-specific antibody (Dianova) conjugated to phycoerythrin, diluted 1:100 in PBS with 2% FCS. Supernatant of untransfected cells is used as a negative control. Flow cytometry is performed on a FACS-Calibur apparatus, the CellQuest software is used to acquire and analyze the data (Becton Dickinson biosciences, Heidelberg). FACS staining and measuring of the fluorescence intensity are performed as described in Current Protocols in Immunology (Coligan, Kruisbeek, Margulies, Shevach and Strober, Wiley-Interscience, 2002).

[0939] Only those constructs showing bispecific binding to human and macaque CD3 as well as to Endosialin are selected for further use.

### 28.7 Bioactivity of Endosialin and CD3 Cross-Species Specific Bispecific Single Chain Antibodies

[0940] Bioactivity of generated bispecific single chain antibodies is analyzed by chromium 51 (⁵¹Cr) release in vitro cytotoxicity assays using the CHO cells transfected with human Endosialin described in Example 28.1 and the CHO cells transfected with macaque Endosialin described in Example 28.2. As effector cells stimulated human CD4/CD56 depleted PBMC or the macaque T cell line 4119LnPx are used, respectively.

[0941] The generation of stimulated human PBMC was described herein above in Example 11.

[0942] Target cells prepared and the assay was performed in analogy to the procedure described for the MCSP×CD3 bispecific single chain antibodies in example 11. Only those constructs showing potent recruitment of cytotoxic activity of effector cells against cells positive for Endosialin are selected for further use.

### 29. Generation and Characterization of CD248 (Endosialin) and CD3 Cross-Species Specific Bispecific Single Chain Molecules

### 29.1 Generation of CD248 and CD3 Cross-Species Specific Bispecific Single Chain Molecules

### Cloning of Cross-Species Specific Binding Molecules

[0943] Bispecific single chain antibody molecules, with a binding specificity cross-species specific for human and non-chimpanzee primate CD3epsilon as well as a binding specificity cross-species specific for human and non-chimpanzee primate CD248, were designed as set out in the following Table 13:

TABLE 13
Formats of anti-CD3 and anti-CD248 cross-species
specific bispecific single chain antibody molecules

| SEQ ID | Formats of protein constructs |
|---|---|
| (nucl/prot) | (N → C) |
| 1665/1664 | EN00B12HLxI2CHL |
| 1679/1678 | EN00C3HLxI2CHL |
| 1693/1692 | EN01D5HLxI2CHL |
| 1707/1706 | EN00E4HLxI2CHL |
| 1721/1720 | EN00F7HLxI2CHL |
| 1735/1734 | EN00H6HLxI2CHL |

[0944] Generation, expression and purification of these cross-species specific bispecific single chain molecules was performed as described above.

[0945] The flow cytometric binding analysis of the CD248 and CD3 cross-species specific bispecific antibodies was performed as described above. The bispecific binding of the single chain molecules listed above, which are cross-species specific for CD248 and cross-species specific for human and non-chimpanzee primate CD3 was clearly detectable as shown in FIG. 58. In the FACS analysis all constructs showed binding to CD3 and CD248 compared to the negative control. Cross-species specificity of the bispecific antibodies to human and macaque CD3 and CD248 antigens was demonstrated.

[0946] Bioactivity of the generated bispecific single chain antibodies was analyzed by chromium 51 (⁵¹Cr) release in vitro cytotoxicity assays as described above. As shown in FIG. 59 all of the generated cross-species specific bispecific single chain antibody constructs demonstrated cytotoxic activity against human CD248 positive target cells elicited by stimulated human CD4/CD56 depleted PBMC and macaque CD248 positive target cells elicited by the macaque T cell line 4119LnPx.

### 30. Generation and Characterization of EpCAM and CD3 Cross-Species Specific Bispecific Single Chain Antibody Molecules

[0947] 30.1 Cloning and expression of human EpCAM antigen on CHO cells

[0948] The sequence of the human EpCAM antigen (′NM_002354, Homo sapiens tumor-associated calcium signal transducer 1 (TACSTD1), mRNA, National Center for Biotechnology Information, http://www.ncbi.nlm.nih.gov/entrez) was used to obtain a synthetic molecule by gene synthesis according to standard protocols. The gene synthesis fragment was also designed as to contain a Kozak site for eukaryotic expression of the construct and restriction sites at the beginning and the end of the DNA. The introduced restriction sites XbaI at the 5′ end and SalI at the 3′ end were utilised during the cloning step into the expression plasmid designated pEFDHFR as described in Raum et al. (loc cit.). After sequence verification the plasmid was used to transfect CHO/dhfr− cells as follows. A sequence verified plasmid was used to transfect CHO/dhfr− cells (ATCC No. CRL 9096; cultivated in RPMI 1640 with stabilized glutamine obtained from Biochrom AG Berlin, Germany, supplemented with 10% FCS, 1% penicillin/streptomycin all obtained from Biochrom AG Berlin, Germany and nucleosides from a stock solution of cell culture grade reagents obtained from Sigma-Aldrich Chemie GmbH, Taufkirchen, Germany, to a final concentration of 10 μg/ml Adenosine, 10 μg/ml Deoxyadenosine and 10 μg/ml Thymidine, in an incubator at 37° C., 95% humidity and 7% CO₂). Transfection was performed using the PolyFect Transfection Reagent (Qiagen GmbH, Hilden, Germany) and 5 μg of plasmid DNA according to the manufacturer's protocol. After culturing for 24 hours cells were washed once with PBS and again cultured in the aforementioned cell culture medium except that the medium was not supplemented with nucleosides and dialysed FCS (obtained from Biochrom AG Berlin, Germany) was used. Thus the cell culture medium did not contain nucleosides and thereby selection was applied on the transfected cells. Approximately 14 days after transfection the outgrowth of resistant cells was observed. After an additional 7 to 14 days the transfectants were tested positive for EpCAM-expression by FACS. Eukaryotic protein expression in DHFR deficient CHO cells was performed as described by Kaufmann R. J. (1990) Methods Enzymol. 185, 537-566. Gene amplification of the construct was induced by increasing concentrations of methothrexate (MTX) to a final concentration of up to 20 nM MTX.

### 30.2 Generation of EpCAM and CD3 Cross-Species Specific Bispecific Single Chain Molecules

[0949] Generally, bispecific single chain antibody molecules, each comprising a domain with a binding specificity for the human and the macaque CD3 antigen as well as a domain with a binding specificity for the human EPCAM antigen, were designed as set out in the following Table 14:

TABLE 14
Formats of anti-CD3 and anti-EpCAM cross-species
specific bispecific single chain antibody molecules

| SEQ ID | Formats of protein constructs |
|---|---|
| (nucl/prot) | (N → C) |
| 945/944 | Ep 5-10 LH x I2C HL |
| 949/948 | Ep 5-10 LH x F12Q HL |
| 947/946 | Ep 5-10 LH x H2C HL |
| 961/960 | hEp 14-A1 LH x I2C HL |
| 973/972 | hEp 14-D2 LH x I2C HL |
| 985/984 | hEp 14-H8 LH x I2C HL |
| 997/996 | hEp 14-A6 LH x I2C HL |
| 1009/1008 | hEp 14-D1 LH x I2C HL |
| 1033/1032 | hEp 14-H4 LH x I2C HL |
| 1045/1044 | hEp 17-A6 LH x I2C HL |
| 1057/1056 | hEp 17-E9 LH x I2C HL |
| 1079/1078 | hEp 18-E3 LH x I2C HL |
| 1091/1090 | hEp 18-F11 LH x I2C HL |
| 1103/1102 | hEp 18-F12 LH x I2C HL |
| 1115/1114 | hEp 18-G1 LH x I2C HL |
| 1127/1126 | hEp 18-G9 LH x I2C HL |
| 1021/1020 | hEp 14-G6 LH x I2C HL |
| 1777/1776 | hEp 18-A6 LH x I2C HL |

[0950] The aforementioned constructs containing the variable light-chain (L) and variable heavy-chain (H) domains specific for human EpCAM and the CD3 specific VH and VL combinations cross-species specific for human and macaque CD3 were obtained by gene synthesis. The gene synthesis fragments were designed and eukaryotic protein expression was performed in analogy to the procedure described in example 9 for the MCSP×CD3 cross-species specific single chain molecules.

### 30.3 Expression and Purification of the Single Domain Bispecific Single Chain Antibody Molecules

[0951] The single domain bispecific single chain antibody molecules were expressed in chinese hamster ovary cells (CHO) or HEK 293 cells as described herein above for the MCSP×CD3 bispecific single chain antibodies.

[0952] The isolation and analysis of the expressed bispecific single chain antibodies has also been described herein above in Example 9.

### 30.4 Flow Cytometric Binding Analysis of the EpCAM and CD3 Cross-Species Specific Bispecific Antibodies

[0953] In order to test the functionality of the cross-species specific bispecific antibody constructs with regard to binding capability to human EpCAM and human/macaque CD3, a FAGS analysis was performed. For this purpose the CHO cells transfected with human EpCAM as described in Example 30.1 and human CD3 positive T cell leukemia cell line HPB-ALL (DSMZ, Braunschweig, ACC483) were used to check the binding to human antigens. The binding reactivity to macaque CD3 was tested by using a macaque T cell line 4119LnPx (kindly provided by Prof Fickenscher, Hygiene Institute, Virology, Erlangen-Nuernberg; Knappe A, et al., and Fickenscher H: Herpesvirus saimiri-transformed macaque T cells are tolerated and do not cause lymphoma after autologous reinfusion. Blood 2000; 95:3256-61.) 200,000 cells of the respective cell population were incubated for 30 min on ice with 50 μl of the purified protein of the cross-species specific bispecific antibody constructs (e. g. 2 μg/ml) Alternatively the cell culture supernatant of transiently produced proteins was used. The cells were washed twice in PBS and binding of the construct was detected with an unlabeled murine Penta His antibody (Qiagen; diluted 1:20 in 50 μl PBS with 2% FCS). After washing, bound anti His antibodies were detected with an Fc gamma-specific antibody (Dianova) conjugated to phycoerythrin, diluted 1:100 in 50 μl PBS with 2% FCS. Fresh culture medium was used as a negative control.

[0954] Flow cytometry was performed on a FACS-Calibur apparatus, the CellQuest software was used to acquire and analyze the data (Becton Dickinson biosciences, Heidelberg). FAGS staining and measuring of the fluorescence intensity were performed as described in Current Protocols in Immunology (Coligan, Kruisbeek, Margulies, Shevach and Strober, Wiley-Interscience, 2002).

[0955] The binding ability of all EpCAM-directed bispecific single chain molecules were clearly detectable as shown in FIG. 60. In the FAGS analysis, all constructs showed binding to human and macaque CD3 and to human EpCAM compared to the negative control using culture medium and 1. and 2. detection antibody. In summary, the cross-species specificity of the bispecific antibody to human and macaque CD3 and human EpCAM could clearly be demonstrated.

### 30.5 Bioactivity of EpCAM and CD3 Cross-Species Specific Bispecific Single Chain Antibodies

[0956] Bioactivity of the generated bispecific single chain antibodies was analyzed by chromium 51 release in vitro cytotoxicity assays using the EpCAM positive cell line described in example 30.1. As effector cells stimulated human CD8 positive T cells or the macaque T cell line 4119LnPx were used.

[0957] Stimulated CD8+ T cells were obtained as follows: The generation of stimulated human PBMC was described herein above in Example Target cells prepared and the assay was performed in analogy to the procedure described for the MCSP×CD3 bispecific single chain antibodies in example 11.

[0958] As shown in FIGS. 61 to 66, all of the indicated cross-species specific bispecific single chain antibody constructs revealed cytotoxic activity against human EpCAM positive target cells elicited by human CD8+ cells and against human EpCAM positive target cells elicited by the macaque T cell line 4119LnPx. As a negative control, an irrelevant bispecific single chain antibody was used.

### 30.6 Cloning and Expression of Murine EpCAM Antigen and a Human-Murine EpCAM Hybrid Antigen on CHO Cells

[0959] The sequence of the mouse EpCAM antigen (′NM 008532, Mus musculus tumor-associated calcium signal transducer 1 (Tacstd1), mRNA., National Center for Biotechnology Information, http://www.ncbi.nlm.nih.gov/entrez) was used to obtain a synthetic molecule by gene synthesis according to standard protocols. The gene synthesis fragment was also designed as to contain a Kozak site for eukaryotic expression of the construct and restriction sites at the beginning and the end of the DNA. The introduced restriction sites XbaI at the 5′ end and SalI at the 3′ end were utilised during the cloning step into the expression plasmid designated pEFDHFR. After sequence verification the plasmid was used to transfect CHO/DHFR⁻ cells as described in example 30.1. The human-murine EpCAM hybrid antigen was generated by exchanging the murine Exon 2 (amino acids no 26-61) for the human Exon 2 amino acids to enable the identification of the epitopes recognised by the cross-species specific bispecific antibody constructs. The deduced sequence was used to obtain a synthetic molecule by gene synthesis and CHO cells were transfected as described above.

### 30.7 Flow Cytometric Binding Analysis of the EpCAM and CD3 Cross-Species Specific Bispecific Antibodies to Different EpCAM Antigens

[0960] In order to analyze the binding ability of the cross-species specific bispecific antibody constructs with regard to binding abilities to different epitopes on human or murine or on a human-mouse hybrid EpCAM, a FACS flow cytometry was performed. For this purpose the CHO cells transfected with human EpCAM as described in example 1, Cho cells transfected with murine EpCAM (example 30.6) and CHO cells transfected with a human-mouse EpCAM hybrid (example 30.6) were used to check the different binding patterns. 200,000 cells of the respective cell population were incubated for 30 min on ice with 50 μl of the cell culture supernatant of transiently produced proteins. The cells were washed twice in PBS and binding of the construct was detected with an unlabeled murine Penta His antibody (Qiagen; diluted 1:20 in 50 μl PBS with 2% FCS). After washing, bound anti His antibodies were detected with an Fc gamma-specific antibody (Dianova) conjugated to phycoerythrin, diluted 1:100 in 50 μl PBS with 2% FCS. Fresh culture medium was used instead of cell culture supernatant from CHO cells transfected with the respective bispecific single chain antibody molecules as a negative control. As positive control for the expression of the murine EpCAM the detection with a rat derived unlabeled antibody specific for murine EpCAM (BD Pharmingen, #552370, Rat IgG2a,k) followed by PE labelled anti Rat IgG2a, κ specific antibody (BD Pharmingen, Heidelberg, #553930) was used.

[0961] Flow cytometry was performed on a FACS-Calibur apparatus, the CellQuest software was used to acquire and analyze the data (Becton Dickinson biosciences, Heidelberg). FACS staining and measuring of the fluorescence intensity were performed as described in Current Protocols in Immunology (Coligan, Kruisbeek, Margulies, Shevach and Strober, Wiley-Interscience, 2002). For the purpose of comparison the median values of the fluorescence intensity was used to generate a bar chart.

[0962] The binding ability of all EpCAM-directed bispecific single chain molecules to CHO cells transfected with human EpCAM was clearly detectable as shown in FIG. 67. None of the human EpCAM specific molecules elicited a median value significantly above the negative control when binding to murine EpCAM was analysed. The binding properties of the human EpCAM specific single chain bispecific antibody molecules to human-mouse EpCAM hybrid antigen revealed two subsets of molecules: Those without a detectable binding to the human-mouse EpCAM hybrid antigen (HD69 HL×I2C HL) and those with a median fluorescence intensity nearly at the level of the binding strength to the human EpCAM antigen (hEp 14-A1 LH×I2C HL; hEp 14-H8 LH×I2C HL; hEp 14-A6 LH×I2C HL; hEp 14-D1 LH×I2C HL; hEp 14-H4 LH×I2C HL; hEp 17-A6 LH×I2C HL; hEp 17-E9 LH×I2C HL; hEp 18-E3 LH×I2C HL; hEp 18-F11 LH×I2C HL; hEp 18-F12 LH×I2C HL; hEp 18-G1 LH×I2C HL; hEp 18-G9 LH×I2C HL; for SEQ ID NOs of the constructs see table 14). The divergent binding patterns of these two subsets of human EpCAM specific single chain bispecific antibody molecules demonstrate different epitopes on the human EpCAM antigen. Transplantation of the human EpCAM Exon 2 domain into the backbone of murine EpCAM led to gain of binding by the EpCAM-directed bispecific single chain molecules of this invention but not by the HD69 HL×I2C HL molecule. Thus, the second binding domain of the EpCAM-CD3 bispecific single chain antibody of the invention binds to an epitope localized in amino acid residues 26 to 61 of the EGF-like domain 1 of EpCAM which is encoded by Exon 2 of the EpCAM gene. Said amino acid residues 26 to 61 of the EGF-like domain 1 of human EpCAM encoded by exon 2 of the EpCAM gene are shown in SEQ ID NO. 1130.

[0963] Accordingly the epitope of the EpCAM-directed bispecific single chain molecules of this invention is mapped to the Exon 2 region of human EpCAM, while other regions of EpCAM participate in forming the epitope of the HD69 HL×I2C HL molecule. Thus, the EpCAM-directed bispecific single chain molecules of this invention form a unique own class of EpCAM-binding molecules, that is clearly differentiated from former EpCAM-binding molecules based on the EpCAM-binder HD69.

### 31. Generation and Characterization of FAP Alpha and CD3 Cross-Species Specific Bispecific Single Chain Antibody Molecules

### 31.1 Generation of CHO Cells Expressing Human FAP Alpha

[0964] The coding sequence of human FAPalpha as published in GenBank (Accession number NM_004460) was obtained by gene synthesis according to standard protocols. The gene synthesis fragment was designed as to contain first a Kozak site for eukaryotic expression of the construct, followed by the coding sequence of the human FAPalpha protein and a stop codon (the cDNA and amino acid sequence of the construct is listed under SEQ ID NOs. 1149 and 1150). The gene synthesis fragment was also designed as to introduce restriction sites at the beginning and at the end of the fragment. The introduced restriction sites, XmaI at the 5′ end and SalI at the 3′ end, were utilised in the following cloning procedures. The gene synthesis fragment was cloned via XmaI and SalI into a plasmid designated pEF-DHFR (pEF-DHFR is described in Raum et al. Cancer Immunol Immunother 50 (2001) 141-150) following standard protocols. The aforementioned procedures were carried out according to standard protocols (Sambrook, Molecular Cloning; A Laboratory Manual, 3rd edition, Cold Spring Harbour Laboratory Press, Cold Spring Harbour, New York (2001)). A clone with sequence-verified nucleotide sequence was transfected into DHFR deficient CHO cells for eukaryotic expression of the construct. Eukaryotic protein expression in DHFR deficient CHO cells was performed as described by Kaufmann R. J. (1990) Methods Enzymol. 185, 537-566. Gene amplification of the construct was induced by increasing concentrations of methotrexate (MTX) to a final concentration of up to 20 nM MTX.

### 31.2 Generation of CHO Cells Expressing Macaque FAP Alpha

[0965] The cDNA sequence of macaque FAP alpha (Cynomolgus) was obtained by a set of four PCRs on cDNA from macaque monkey skin prepared according to standard protocols. The following reaction conditions: 1 cycle at 94° C. for 3 minutes followed by 40 cycles with 94° C. for 0.5 minutes, 56° C. for 0.5 minutes and 72° C. for 3 minutes followed by a terminal cycle of 72° C. for 3 minutes and the following primers were used:

forward primer:
(SEQ ID NO. 1153)
5′-cagcttccaactacaaagacagac-3′
reverse primer:
(SEQ ID NO. 1154)
5′-tttcctcttcataaacccagtctgg-3′
forward primer:
(SEQ ID NO. 1155)
5′-ttgaaacaaagaccaggagatccacc-3′
reverse primer:
(SEQ ID NO. 1156)
5′-agatggcaagtaacacacttcttgc-3′
forward primer:
(SEQ ID NO. 1157)
5′-gaagaaacatctacagaattagcattgg-3′
reverse primer:
(SEQ ID NO. 1158)
5′-cacatttgaaaagaccagttccagatgc-3′
forward primer:
(SEQ ID NO. 1159)
5′-agattacagctgtcagaaaattcatagaaatgg-3′
reverse primer:
(SEQ ID NO. 1160)
5′-atataaggttttcagattctgatacaggc-3′

[0966] These PCRs generated four overlapping fragments, which were isolated and sequenced according to standard protocols using the PCR primers, and thereby provided the cDNA sequence coding macaque FAPalpha. To generate a construct for expression of macaque FAPalpha a cDNA fragment was obtained by gene synthesis according to standard protocols (the cDNA and amino acid sequence of the construct is listed under SEQ ID NOs. 1151 and 1152). This construct contains the complete coding sequence of macaque FAPalpha followed by a stop codon. The gene synthesis fragment was also designed as to contain a Kozak site for eukaryotic expression of the construct and restriction sites at the beginning and the end of the fragment containing the cDNA. The introduced restriction sites, EcoRI at the 5′ end and SalI at the 3′ end, were utilised in the following cloning procedures. The gene synthesis fragment was cloned via EcoRI and SalI into a plasmid designated pEF-DHFR (pEF-DHFR is described in Raum et al. Cancer Immunol Immunother 50 (2001) 141-150) following standard protocols. The aforementioned procedures were carried out according to standard protocols (Sambrook, Molecular Cloning; A Laboratory Manual, 3rd edition, Cold Spring Harbour Laboratory Press, Cold Spring Harbour, New York (2001)). A clone with sequence-verified nucleotide sequence was transfected into DHFR deficient CHO cells for eukaryotic expression of the construct. Eukaryotic protein expression in DHFR deficient CHO cells was performed as described by Kaufmann R. J. (1990) Methods Enzymol. 185, 537-566. Gene amplification of the construct was induced by increasing concentrations of methotrexate (MTX) to a final concentration of up to 20 nM MTX.

### 31.3 Generation of FAP Alpha and CD3 Cross-Species Specific Bispecific Single Chain Molecules

### Cloning of Cross-Species Specific Binding Molecules

[0967] Generally, bispecific single chain antibody molecules, each comprising a domain with a binding specificity cross-species specific for human and non-chimpanzee primate CD3 epsilon as well as a domain with a binding specificity cross-species specific for human and non-chimpanzee primate FAP alpha, were designed as set out in the following Table 15:

TABLE 15
Formats of anti-CD3 and anti-FAP alpha cross-species
specific bispecific single chain antibody molecules

| SEQ ID | |
|---|---|
| NO. | Formats of protein constructs |
| (nucl/prot) | (N → C) |
| 1144/1143 | FAPA-1 LH x I2C HL |
| 1148/1147 | FAPA-1 LH x F12Q HL |
| 1146/1145 | FAPA-1 LH x H2C HL |

[0968] The aforementioned constructs containing the variable light-chain (L) and variable heavy-chain (H) domains cross-species specific for human and macaque FAP alpha and the CD3 specific VH and VL combinations cross-species specific for human and macaque CD3 were obtained by gene synthesis. The gene synthesis fragments were designed and eukaryotic protein expression was performed in analogy to the procedure described in example 9 for the MCSP×CD3 cross-species specific single chain molecules.

### 31.4 Expression and Purification of the Bispecific Single Chain Antibody Molecules

[0969] The bispecific single chain antibody molecules were expressed in Chinese hamster ovary cells (CHO) or HEK 293 cells as described herein above for the MCSP×CD3 bispecific single chain antibodies.

[0970] The isolation and analysis of the expressed bispecific single chain antibodies has also been described herein above in Example 9.

[0971] 31.5 Flow cytometric binding analysis of the FAP alpha and CD3 cross-species specific bispecific antibodies

[0972] In order to test the functionality of the cross-species specific bispecific antibody constructs regarding the capability to bind to human and macaque FAPalpha and CD3, respectively, a FACS analysis was performed. For this purpose CHO cells transfected with human FAPalpha as described in Example 31.1 and the human CD3 positive T cell leukemia cell line HPB-ALL (DSMZ, Braunschweig, ACC483) were used to test the binding to human antigens. The binding reactivity to macaque antigens was tested by using the generated macaque FAPalpha transfectant described in Example 31.2 and a macaque T cell line 4119LnPx (kindly provided by Prof Fickenscher, Hygiene Institute, Virology, Erlangen-Nuernberg; published in Knappe A, et al., and Fickenscher H., Blood 2000, 95, 3256-61). 200.000 cells of the respective cell lines were incubated for 30 min on ice with 50 μl of cell culture supernatant of transfected cells expressing the cross-species specific bispecific antibody constructs. The cells were washed twice in PBS with 2% FCS and binding of the construct was detected with a murine Penta His antibody (Qiagen; diluted 1:100 in 50 μl PBS with 2% FCS). After washing, bound anti His antibodies were detected with an Fc gamma-specific antibody (Dianova) conjugated to phycoerythrin, diluted 1:100 in PBS with 2% FCS. Supernatant of untransfected cells was used as a negative control.

[0973] Flow cytometry was performed on a FACS-Calibur apparatus, the CellQuest software was used to acquire and analyze the data (Becton Dickinson biosciences, Heidelberg). FACS staining and measuring of the fluorescence intensity were performed as described in Current Protocols in Immunology (Coligan, Kruisbeek, Margulies, Shevach and Strober, Wiley-Interscience, 2002).

[0974] The bispecific binding of the single chain molecules listed above, which are cross-species specific for FAPalpha and cross-species specific for human and non-chimpanzee primate CD3 was clearly detectable as shown in FIG. 68. In the FACS analysis all constructs showed binding to CD3 and FAPalpha compared to the negative control. Cross-species specificity of the bispecific antibodies to human and macaque CD3 and FAPalpha antigens was demonstrated.

### 31.6 Bioactivity of FAPalpha and CD3 Cross-Species Specific Bispecific Single Chain Antibodies

[0975] Bioactivity of the generated bispecific single chain antibodies was analyzed by chromium 51 (⁵¹Cr) release in vitro cytotoxicity assays using the CHO cells transfected with human FAPalpha described in Example 31.1 and the CHO cells transfected with macaque FAPalpha described in Example 31.2. As effector cells stimulated human CD4/CD56 depleted PBMC or the macaque T cell line 4119LnPx were used, respectively.

[0976] The generation of stimulated human PBMC was described herein above in Example 11.

[0977] Target cells prepared and the assay was performed in analogy to the procedure described for the MCSP×CD3 bispecific single chain antibodies in example 11. As shown in FIG. 69 all of the generated cross-species specific bispecific single chain antibody constructs demonstrated cytotoxic activity against human FAPalpha positive target cells elicited by stimulated human CD4/CD56 depleted PBMC and macaque FAPalpha positive target cells elicited by the macaque T cell line 4119LnPx.

### 31.7 Generation of Additional FAP Alpha and CD3 Cross-Species Specific Bispecific Single Chain Antibody Molecules

[0978] The human antibody germline VH sequence VH1 1-03 (http://vbase.mrc-cpe.cam.ac.uk/) is chosen as framework context for CDRH1 (SEQ ID NO. 1137), CDRH2 (SEQ ID NO. 1138) and CDRH3 (SEQ ID NO. 1139). For the human VH several degenerated oligonucleotides have to be synthesized that overlap in a terminal stretch of approximately 15-20 nucleotides. To this end every second primer is an antisense primer. For VH1 1-03 the following oligonucleotides are used:

5′FAP-VH-A-XhoI
(SEQ ID NO. 1161)
CCG CTA CTC GAG TCT GGA SCT GAG STG RWG AAG CCT
GGG GCT TCA GTA AAG
3′FAP-VH-B
(SEQ ID NO. 1162)
CTG TCT CAC CCA GTG TAT GGT GTA TTC AGT GAA TGT
GTA TCY AGA AGY CTT GCA GGA CAY CTT TAC TGA AGC
CCC
5′FAP-VH-C
(SEQ ID NO. 1163)
CAC TGG GTG AGA CAG KCC CMT GGA MAG AGM CTT GAG
TGG ATK GGA GGT ATT AAT CCT AAC AAT GGT ATT CCT
AAC TAC
3′FAP-VH-D
(SEQ ID NO. 1164)
CAT GTA GGC GGT GCT GGM GGA CKT GYC TMY AGT TAW
TGT GRC CCT GCC CTT GAA CTT CTG ATT GTA GTT AGG
AAT ACC
5′FAP-VH-E
(SEQ ID NO. 1165)
AGC ACC GCC TAC ATG GAG CTC MGC AGC CTG ASA TCT
GAG GAT ACT GCG GTC TAT TWC TGT GCA AGA AGA AGA
ATC GCC
3′FAP-VH-F-BstEII
(SEQ ID NO. 1166)
CCA GTA GGT GAC CAG GGT TCC TTG ACC CCA GTA GTC
CAT AGC ATG GCC CTC GTC GTA ACC ATA GGC GAT TCT
TCT TCT TGC ACA

[0979] This primer set spans over the whole corresponding VH sequence.

[0980] Within the set primers are mixed in equal amounts (e.g. 1 μl of each primer (primer stocks 20 to 100 μM) to a 20 μl PCR reaction) and added to a PCR mix consisting of PCR buffer, nucleotides and Taq polymerase. This mix is incubated at 94° C. for 3 minutes, 65° C. for 1 minute, 62° C. for 1 minute, 59° C. for 1 minute, 56° C. for 1 minute, 52° C. for 1 minute, 50° C. for 1 minute and at 72° C. for 10 minutes in a PCR cycler. Subsequently the product is run in an agarose gel electrophoresis and the product of a size from 200 to 400 isolated from the gel according to standard methods.

[0981] The VH PCR product is then used as a template for a standard PCR reaction using primers that incorporate N-terminal and C-terminal suitable cloning restriction sites. The DNA fragment of the correct size (for a VH approximately 350 nucleotides) is isolated by agarose gel electrophoresis according to standard methods. In this way sufficient VH DNA fragment is amplified.

[0982] The human antibody germline VL sequence VkII O11 (http://vbase.mrc-cpe.cam.ac.uk/) is chosen as framework context for CDRL1 (SEQ ID NO. 1132), CDRL2 (SEQ ID NO. 1133) and CDRL3 (SEQ ID NO. 1134). For this human VL several degenerated oligonucleotides have to be synthesized that overlap in a terminal stretch of approximately 15-20 nucleotides. To this end every second primer is an antisense primer. Restriction sites needed for later cloning within the oligonucleotides are deleted. For VkII O11 the following oligonucleotides are used:

5′FAP-VL-A-SacI
(SEQ ID NO. 1167)
CGA CCT GAG CTC GTG ATG ACA CAG ACT CCA YYC TCC
CTA SCT GTG ACA SYT GGA GAG MMG GYT TCT ATS AGC
TGC AAG TCC AGT CAG
3′FAP-VL-B
(SEQ ID NO. 1168)
AGA CTG CCC TGG CTT CTG CWG GWA CCA GGC CAA GTA
GTT CTT TTG ATT ACG ACT ATA TAA AAG GCT CTG ACT
GGA CTT GCA GCT
5′FAP-VL-C
(SEQ ID NO. 1169)
CAG AAG CCA GGG CAG TCT CCT MAA CTG CTG ATT TWC
TGG GCA TCC ACTA GG GAA TCT GGG GTC CCT GAT CGC
TTC TCA GGC AGT GGA
3′FAP-VL-D
(SEQ ID NO. 1170)
ATA TTG CTG ACA GTM ATA AAC TSC CAS GTC CTC AGC
CTS CAC WCT GCT GAT CKT GAG AKT GAA ATC CGT CCC
ARA TCC ACT GCC TGA GAA
3′FAP-VL-E-BsiWI/SpeI
(SEQ ID NO. 1171)
CCA GTA ACT AGT CGT ACG TTT GAT CTC CAC CTT GGT
CCC ACC ACC GAA CGT GAG CGG ATA GCT AAA ATA TTG
CTG ACA GT

[0983] This primer set spans over the whole corresponding VL sequence.

[0984] Within the set primers are mixed in equal amounts (e.g. 1 μl of each primer (primer stocks 20 to 100 μM) to a 20 μl PCR reaction) and added to a PCR mix consisting of PCR buffer, nucleotides and Taq polymerase. This mix is incubated at 94° C. for 3 minutes, 65° C. for 1 minute, 62° C. for 1 minute, 59° C. for 1 minute, 56° C. for 1 minute, 52° C. for 1 minute, 50° C. for 1 minute and at 72° C. for 10 minutes in a PCR cycler. Subsequently the product is run in an agarose gel electrophoresis and the product of a size from 200 to 400 isolated from the gel according to standard methods.

[0985] The VL PCR product is then used as a template for a standard PCR reaction using primers that incorporate N-terminal and C-terminal suitable cloning restriction sites. The DNA fragment of the correct size (for a VL approximately 330 nucleotides) is isolated by agarose gel electrophoresis according to standard methods. In this way sufficient VL DNA fragment is amplified.

[0986] The final VH1 1-03-based VH PCR product (i.e. the repertoire of human/humanized VH) is then combined with the final VkII O11-based VL PCR product (i.e. the repertoire of human/humanized VL) in the phage display vector pComb3H5Bhis to form a library of functional scFvs from which—after display on filamentous phage-anti-FAPalpha binders are selected, screened, identified and confirmed as described in the following:

[0987] 450 ng of the light chain fragments (SacI-SpeI digested) are ligated with 1400 ng of the phagemid pComb3H5Bhis (SacI-SpeI digested; large fragment). The resulting combinatorial antibody library is then transformed into 300 μl of electrocompetent Escherichia coli XL1 Blue cells by electroporation (2.5 kV, 0.2 cm gap cuvette, 25 μFD, 200 Ohm, Biorad gene-pulser) resulting in a library size of more than 10⁷ independent clones. After one hour of phenotype expression, positive transformants are selected for carbenicillin resistance encoded by the pComb3H5BHis vector in 100 ml of liquid super broth (SB)-culture over night. Cells are then harvested by centrifugation and plasmid preparation is carried out using a commercially available plasmid preparation kit (Qiagen).

[0988] 2800 ng of this plasmid-DNA containing the VL-library (XhoI-BstEII digested; large fragment) are ligated with 900 ng of the heavy chain V-fragments (XhoI-BstEII digested) and again transformed into two 300 μl aliquots of electrocompetent E. coli XL1 Blue cells by electroporation (2.5 kV, 0.2 cm gap cuvette, 25 μFD, 200 Ohm) resulting in a total VH-VL scFv (single chain variable fragment) library size of more than 10⁷ independent clones.

[0989] After phenotype expression and slow adaptation to carbenicillin, the E. coli cells containing the antibody library are transferred into SB-carbenicillin (SB with 50 μg/mL carbenicillin) selection medium. The E. coli cells containing the antibody library are then infected with an infectious dose of 10¹² particles of helper phage VCSM13 resulting in the production and secretion of filamentous M13 phage, wherein each phage particle contains single stranded pComb3H5BHis-DNA encoding a scFv-fragment and displays the corresponding scFv-protein as a translational fusion to phage coat protein III. This pool of phages displaying the antibody library is used for the selection of antigen binding entities.

[0990] For this purpose the phage library carrying the cloned scFv-repertoire is harvested from the respective culture supernatant by PEG8000/NaCl precipitation and centrifugation. Approximately 10¹¹ to 10¹² scFv phage particles are resuspended in 0.4 ml of PBS/0.1% BSA and incubated with 10⁵ to 10⁷ FAPalpha transfected CHO cells (see example 31.1) for 1 hour on ice under slow agitation. These FAPalpha transfected CHO cells are harvested beforehand by centrifugation, washed in PBS and resuspended in PBS/1% FCS (containing 0.05% Na Azide). scFv phage which do not specifically bind to the FAPalpha transfected CHO cells are eliminated by up to five washing steps with PBS/1% FCS (containing 0.05% Na Azide). After washing, binding entities are eluted from the cells by resuspending the cells in HCl-glycine pH 2.2 (10 min incubation with subsequent vortexing) and after neutralization with 2 M Tris pH 12, the eluate is used for infection of a fresh uninfected E. coli XL1 Blue culture (OD600>0.5). The E. coli culture containing E. coli cells successfully transduced with a phagemid copy, encoding a human/humanized scFv-fragment, are again selected for carbenicillin resistance and subsequently infected with VCMS 13 helper phage to start the second round of antibody display and in vitro selection. Typically a total of 4 to 5 rounds of selections are carried out.

[0991] In order to screen for FAPalpha specific binders plasmid DNA corresponding to 4 and 5 rounds of panning is isolated from E. coli cultures after selection. For the production of soluble scFv-protein, VH-VL-DNA fragments are excised from the plasmids (XhoI-SpeI). These fragments are cloned via the same restriction sites into the plasmid pComb3H5BFlag/His differing from the original pComb3H5BHis in that the expression construct (e.g. scFv) includes a Flag-tag (DYKDDDDK) between the scFv and the His6-tag and the additional phage proteins are deleted. After ligation, each pool (different rounds of panning) of plasmid DNA is transformed into 100 μl heat shock competent E. coli TG1 or XLI blue and plated onto carbenicillin LB-agar. Single colonies are picked into 100 μl of LB carb (LB with 50 μg/ml carbenicillin). E. coli transformed with pComb3H5BFlag/His containing a VL- and VH-segment produce soluble scFv in sufficient amounts after induction with 1 mM IPTG. Due to a suitable signal sequence, the scFv is exported into the periplasma where it folds into a functional conformation.

[0992] Single E. coli bacterial colonies from the transformation plates are picked for periplasmic small scale preparations and grown in SB-medium (e.g. 10 nil) supplemented with 20 mM MgCl₂ and carbenicillin 50 μg/ml (and re-dissolved in PBS (e.g. 1 nil) after harvesting. A temperature shock is applied by four rounds of freezing at −70′C and thawing at 37′C whereby the outer membrane of the bacteria is destroyed and the soluble periplasmic proteins including the scFvs are released into the supernatant. After elimination of intact cells and cell-debris by centrifugation, the supernatant containing the anti-FAPalpha scFvs is collected and used for the identification of FAPalpha specific binders as follows:

[0993] Binding of scFvs to FAPalpha is tested by flow cytometry on FAPalpha transfected CHO cells (see example 31.1); untransfected CHO cells are use as negative control. For flow cytometry 2.5×10⁵ cells are incubated with 50 μl of scFv periplasmic preparation or with 5 μg/ml of purified scFv in 50 μl PBS with 2% FCS. The binding of scFv is detected with an anti-His antibody (Penta-His Antibody, BSA free, Qiagen GmbH, Hilden, FRG) at 2 μg/ml in 50 μl PBS with 2% FCS. As a second step reagent a R-Phycoerythrin-conjugated affinity purified F(ab′)2 fragment, goat anti-mouse IgG (Fc-gamma fragment specific), diluted 1:100 in 50 μl PBS with 2% FCS (Dianova, Hamburg, FRG) is used. The samples are measured on a FACSscan (BD biosciences, Heidelberg, FRG).

[0994] Single clones are then analyzed for favorable properties and amino acid sequence. FAPalpha specific scFvs are converted into recombinant bispecific single chain antibodies by joining them via a Gly₄Ser₁-linker with the CD3 specific scFv I2C (SEQ ID NO. 185) or any other CD3 specific scFv of the invention to result in constructs with the domain arrangement VL_{FAPalpha}-(Gly₄Ser₁)₃-VH_{FAPalpha}-Ser₁Gly₄Ser₁-VH_{CD3}-(Gly₄Ser₁)₃-VL_{CD3} or alternative domain arrangements. For expression in CHO cells the coding sequences of (i) an N-terminal immunoglobulin heavy chain leader comprising a start codon embedded within a Kozak consensus sequence and (ii) a C-terminal His₆-tag followed by a stop codon are both attached in frame to the nucleotide sequence encoding the bispecific single chain antibodies prior to insertion of the resulting DNA-fragment as obtained by gene synthesis into the multiple cloning site of the expression vector pEF-DHFR (Raum et al. Cancer Immunol Immunother 50 (2001) 141-150). Transfection of the generated expression plasmids, protein expression and purification of cross-species specific bispecific antibody constructs are performed as described in Examples 31.3 and 31.4. All other state of the art procedures are carried out according to standard protocols (Sambrook, Molecular Cloning; A Laboratory Manual, 3rd edition, Cold Spring Harbour Laboratory Press, Cold Spring Harbour, New York (2001)).

[0995] Identification of functional bispecific single-chain antibody constructs is carried out by flow cytometric binding analysis of culture supernatant from transfected cells expressing the cross-species specific bispecific antibody constructs. Analysis is performed as described in Example 31.5. Only those constructs showing bispecific binding to human and macaque CD3 as well as to FAPalpha are selected for further use.

[0996] Cytotoxic activity of the generated cross-species specific bispecific single chain antibody constructs against FAPalpha positive target cells elicited by effector cells is analyzed as described in Example 31.6. Only those constructs showing potent recruitment of cytotoxic activity of effector cells against cells positive for FAPalpha are selected for further use.

### 32. Generation and Characterization of Additional FAPalpha and CD3 Cross-Species Specific Bispecific Single Chain Molecules

### 32.1 Generation of FAPalpha and CD3 Cross-Species Specific Bispecific Single Chain Molecules

### Cloning of Cross-Species Specific Binding Molecules

[0997] Bispecific single chain antibody molecules, with a binding specificity cross-species specific for human and non-chimpanzee primate CD3epsilon as well as a binding specificity cross-species specific for human and non-chimpanzee primate FAPalpha, were designed as set out in the following Table 16:

TABLE 16
Formats of anti-CD3 and anti-FAPalpha cross-species
specific bispecific single chain antibody molecules

| SEQ ID | Formats of protein constructs |
|---|---|
| (nucl/prot) | (N → C) |
| 1861/1860 | FA19D12HLxI2CHL |
| 1847/1846 | FA20H3HLxI2CHL |
| 1791/1790 | FA22A9HLxI2CHL |
| 1805/1804 | FA22C11HLxI2CHL |
| 1875/1874 | FA19D9HLxI2CHL |
| 1819/1818 | FA22D8HLxI2CHL |
| 1833/1832 | FA22E8HLxI2CHL |

[0998] Generation, expression and purification of these cross-species specific bispecific single chain molecules was performed as described above.

[0999] The flow cytometric binding analysis of the FAPalpha and CD3 cross-species specific bispecific antibodies was performed as described above. The bispecific binding of the single chain molecules listed above, which are cross-species specific for FAPalpha and cross-species specific for human and non-chimpanzee primate CD3 was clearly detectable as shown in FIG. 70. In the FAGS analysis all constructs showed binding to CD3 and FAPalpha compared to the negative control. Cross-species specificity of the bispecific antibodies to human and macaque CD3 and FAPalpha antigens was demonstrated.

[1000] Bioactivity of the generated bispecific single chain antibodies was analyzed by chromium 51 (⁵¹Cr) release in vitro cytotoxicity assays as described above. As shown in FIG. 71 all of the generated cross-species specific bispecific single chain antibody constructs demonstrated cytotoxic activity against human FAPalpha positive target cells elicited by stimulated human CD4/CD56 depleted PBMC and macaque FAPalpha positive target cells elicited by the macaque T cell line 4119LnPx.

32.2 Generation and Flow Cytometric Binding Analysis of Cross-Species Specific Single Chain Antibody Fragments (scFv) Binding to FAPalpha

[1001] scFv cross-species specific for FAPalpha were generated as described above and designated as set out in the following Table 17:

TABLE 17
Designation of cross-species specific single
chain antibody fragments

| SEQ ID | |
|---|---|
| (nucl/prot) | Designation |
| 1901/1900 | 86C12HL |
| 1887/1886 | 87G9HL |
| 1971/1970 | 86F12HL |
| 1957/1956 | 86F10HL |
| 1985/1984 | 86F2HL |
| 1943/1942 | 86E5HL |
| 1929/1928 | 86D6HL |
| 1915/1914 | 86D2HL |

[1002] The flow cytometric binding analysis of periplasmic preparations containing scFv cross-species specific for FAPalpha using CHO cells transfected with human FAPalpha and CHO cells transfected with macaque FAPalpha was performed as described above. The binding of the scFv listed above, which are cross-species specific for FAPalpha was clearly detectable as shown in FIG. 72. In the FAGS analysis all constructs showed binding to FAPalpha compared to the negative control. Cross-species specificity of the scFv antibodies to human and macaque FAPalpha antigens was demonstrated.

[1003] Cloning of cross-species specific binding molecules based on the scFvs and expression and purification of these cross-species specific bispecific single chain molecules is performed as described above. Flow cytometric analysis of cross-species specific bispecific binding and analysis of bioactivity by chromium 51 (⁵¹Cr) release in vitro cytotoxicity assays is performed as described above. Based on demonstrated cross-species specific bispecific binding and recruited cytotoxicity cross-species specific binding molecules are selected for further use.

[1004] Human/humanized equivalents of non-human scFvs cross-species specific for FAPalpha contained in the selected cross-species specific bispecific single chain molecules are generated as described herein. Cloning of cross-species specific binding molecules based on these human/humanized scFvs and expression and purification of these cross-species specific bispecific single chain molecules is performed as described above. Flow cytometric analysis of cross-species specific bispecific binding and analysis of bioactivity by chromium 51 (⁵¹Cr) release in vitro cytotoxicity assays is performed as described above. Based on demonstrated cross-species specific bispecific binding and recruited cytotoxicity cross-species specific binding molecules are selected for further use.

### 33. Generation and Characterization of IGF-1R and CD3 Cross-Species Specific Bispecific Single Chain Molecules

### 33.1 Generation of CHO Cells Expressing Human IGF-1R

[1005] The coding sequence of human IGF-1R as published in GenBank (Accession number NM_000875) was obtained by gene synthesis according to standard protocols. The gene synthesis fragment was designed as to contain first a Kozak site for eukaryotic expression of the construct followed by the coding sequence of the human IGF-1R protein and a stop codon (the cDNA and amino acid sequence of the construct is listed under SEQ ID Nos 2011 and 2012). The gene synthesis fragment was also designed as to introduce restriction sites at the beginning and at the end of the fragment. The introduced restriction sites, EcoRI at the 5′ end and SalI at the 3′ end, were utilized in the following cloning procedures. Undesirable internal restriction sites were removed by silent mutation of the coding sequence in the gene synthesis fragment. The gene synthesis fragment was cloned via EcoRI and SalI into a plasmid designated pEF-DHFR (pEF-DHFR is described in Raum et al. Cancer Immunol Immunother 50 (2001) 141-150) following standard protocols. The aforementioned procedures were carried out according to standard protocols (Sambrook, Molecular Cloning; A Laboratory Manual, 3rd edition, Cold Spring Harbour Laboratory Press, Cold Spring Harbour, New York (2001)). A clone with sequence-verified nucleotide sequence was transfected into DHFR deficient CHO cells for eukaryotic expression of the construct. Eukaryotic protein expression in DHFR deficient CHO cells was performed as described by Kaufmann R. J. (1990) Methods Enzymol. 185, 537-566. Gene amplification of the construct was induced by increasing concentrations of methotrexate (MTX) to a final concentration of up to 20 nM MTX.

### 33.2 Generation of CHO Cells Expressing Macaque IGF-1R

[1006] The coding sequence of macaque IGF-1R as published in GenBank (Accession number XM_001100407) was obtained by gene synthesis according to standard protocols. The gene synthesis fragment was designed as to contain first a Kozak site for eukaryotic expression of the construct followed by the coding sequence of the macaque IGF-1R protein and a stop codon (the cDNA and amino acid sequence of the construct is listed under SEQ ID Nos 2013 and 2014). The gene synthesis fragment was also designed as to introduce restriction sites at the beginning and at the end of the fragment. The introduced restriction sites, EcoRI at the 5′ end and SalI at the 3′ end, were utilized in the following cloning procedures. Undesirable internal restriction sites were removed by silent mutation of the coding sequence in the gene synthesis fragment. The gene synthesis fragment was cloned via EcoRI and SalI into a plasmid designated pEF-DHFR (pEF-DHFR was described in Raum et al. Cancer Immunol Immunother 50 (2001) 141-150) following standard protocols. The aforementioned procedures were carried out according to standard protocols (Sambrook, Molecular Cloning; A Laboratory Manual, 3rd edition, Cold Spring Harbour Laboratory Press, Cold Spring Harbour, New York (2001)). A clone with sequence-verified nucleotide sequence was transfected into DHFR deficient CHO cells for eukaryotic expression of the construct. Eukaryotic protein expression in DHFR deficient CHO cells was performed as described by Kaufmann R. J. (1990) Methods Enzymol. 185, 537-566. Gene amplification of the construct was induced by increasing concentrations of methotrexate (MTX) to a final concentration of up to 20 nM MTX.

### 33.3 Generation of IGF-1R and CD3 Cross-Species Specific Bispecific Single Chain Molecules

### Cloning of Cross-Species Specific Binding Molecules

[1007] Generally, bispecific single chain antibody molecules, each comprising a domain with a binding specificity cross-species specific for human and non-chimpanzee primate CD3epsilon as well as a domain with a binding specificity cross-species specific for human and non-chimpanzee primate IGF-1R, were designed as set out in the following Table 18:

TABLE 18
Formats of anti-CD3 and anti-IGF-1R cross-species
specific bispecific single chain antibody molecules

| SEQ ID | Formats of protein constructs |
|---|---|
| (nucl/prot) | (N → C) |
| 2028/2027 | IGF1R2HLxI2CHL |
| 2042/2041 | IGF1R7HLxI2CHL |
| 2056/2055 | IGF1R9HLxI2CHL |
| 2070/2069 | IGF1R10HLxI2CHL |
| 2084/2083 | IGF1R11HLxI2CHL |
| 2098/2097 | IGF1R12HLxI2CHL |
| 2112/2111 | IGF1R13HLxI2CHL |
| 2126/2125 | IGF1R15HLxI2CHL |
| 2140/2139 | IGF1R16HLxI2CHL |
| 2154/2153 | IGF1R17HLxI2CHL |
| 2168/2167 | IGF1R19HLxI2CHL |
| 2182/2181 | IGF1R20HLxI2CHL |
| 2196/2195 | IGF1R21HLxI2CHL |
| 2210/2209 | IGF1R23HLxI2CHL |
| 2224/2223 | IGF1R24HLxI2CHL |

[1008] Generation, Expression and Purification of these Cross-Species Specific Bispecific Single Chain Molecules was Performed as Described Above.

[1009] The flow cytometric binding analysis of the IGF-1R and CD3 cross-species specific bispecific antibodies was performed as described above. The bispecific binding of the single chain molecules listed above, which are cross-species specific for IGF-1R and cross-species specific for human and non-chimpanzee primate CD3 was clearly detectable as shown in FIG. 73. In the FAGS analysis all constructs showed binding to CD3 and IGF-1R compared to the negative control. Cross-species specificity of the bispecific antibodies to human and macaque CD3 and IGF-1R antigens was demonstrated.

[1010] Bioactivity of the generated bispecific single chain antibodies was analyzed by chromium 51 (⁵¹Cr) release in vitro cytotoxicity assays as described above. All the cross-species specific bispecific single chain antibody constructs shown in FIG. 74 demonstrated cytotoxic activity against human IGF-1R positive target cells elicited by stimulated human CD4/CD56 depleted PBMC and macaque IGF-1R positive target cells elicited by the macaque T cell line 4119LnPx.

[1011] Human/humanized equivalents of non-human scFvs cross-species specific for IGF-1R contained in the cross-species specific bispecific single chain molecules are generated as described herein. Cloning of cross-species specific binding molecules based on these human/humanized scFvs and expression and purification of these cross-species specific bispecific single chain molecules is performed as described above. Flow cytometric analysis of cross-species specific bispecific binding and analysis of bioactivity by chromium 51 (⁵¹Cr) release in vitro cytotoxicity assays is performed as described above. Based on demonstrated cross-species specific bispecific binding and recruited cytotoxicity cross-species specific binding molecules are selected for further use.

Lengthy table referenced here
US20200362039A1-20201119-T00001
Please refer to the end of the specification for access instructions.

LENGTHY TABLES
The patent application contains a lengthy table section. A copy of the table is available in electronic form from the USPTO web site (https://seqdata.uspto.gov/?pageRequest=docDetail&DocID=US20200362039A1). An electronic copy of the table will also be available from the USPTO upon request and payment of the fee set forth in 37 CFR 1.19(b)(3).

1. A bispecific single chain antibody molecule comprising a first binding domain capable of binding to an epitope of human and non-chimpanzee primate CD3E (epsilon) chain, wherein the epitope is part of an amino acid sequence comprised in the group consisting of SEQ ID NOs. 2, 4, 6, and 8, and a second binding domain capable of binding to an antigen selected from the group consisting of Prostate Stem Cell Antigen (PSCA), B-Lymphocyte antigen CD19 (CD19), hepatocyte growth factor receptor (C-MET), Endosialin, the EGF-like domain 1 of EpCAM, encoded by exon 2, Fibroblast activation protein alpha (FAP alpha) and Insulin-like growth factor I receptor (IGF-IR or IGF-1R).

2. The bispecific single chain antibody molecule of claim 1, wherein at least one of said first or second binding domain is CDR-grafted, humanized or human.

3. The bispecific single chain antibody molecule according to claim 1, wherein the first binding domain capable of binding to an epitope of human and non-chimpanzee primate CD3E chain comprises a VL region comprising CDR-L1, CDR-L2 and CDR-L3 selected from:
(a) CDR-L1 as depicted in SEQ ID NO. 27, CDR-L2 as depicted in SEQ ID NO. 28 and CDR-L3 as depicted in SEQ ID NO. 29;
(b) CDR-L1 as depicted in SEQ ID NO. 117, CDR-L2 as depicted in SEQ ID NO. 118 and CDR-L3 as depicted in SEQ ID NO. 119; and
(c) CDR-L1 as depicted in SEQ ID NO. 153, CDR-L2 as depicted in SEQ ID NO. 154 and CDR-L3 as depicted in SEQ ID NO. 155.

4. The bispecific single chain antibody molecule according to claim 1, wherein the first binding domain capable of binding to an epitope of human and non-chimpanzee primate CD3E chain comprises a VH region comprising CDR-H 1, CDR-H2 and CDR-H3 selected from:
(a) CDR-H1 as depicted in SEQ ID NO. 12, CDR-H2 as depicted in SEQ ID NO. 13 and CDR-H3 as depicted in SEQ ID NO. 14;
(b) CDR-H1 as depicted in SEQ ID NO. 30, CDR-H2 as depicted in SEQ ID NO. 31 and CDR-H3 as depicted in SEQ ID NO. 32;
(c) CDR-H1 as depicted in SEQ ID NO. 48, CDR-H2 as depicted in SEQ ID NO. 49 and CDR-H3 as depicted in SEQ ID NO. 50;
(d) CDR-H1 as depicted in SEQ ID NO. 66, CDR-H2 as depicted in SEQ ID NO. 67 and CDR-H3 as depicted in SEQ ID NO. 68;
(e) CDR-H1 as depicted in SEQ ID NO. 84, CDR-H2 as depicted in SEQ ID NO. 85 and CDR-H3 as depicted in SEQ ID NO. 86;
(f) CDR-H1 as depicted in SEQ ID NO. 102, CDR-H2 as depicted in SEQ ID NO. 103 and CDR-H3 as depicted in SEQ ID NO. 104;
(g) CDR-H1 as depicted in SEQ ID NO. 120, CDR-H2 as depicted in SEQ ID NO. 121 and CDR-H3 as depicted in SEQ ID NO. 122;
(h) CDR-H1 as depicted in SEQ ID NO. 138, CDR-H2 as depicted in SEQ ID NO. 139 and CDR-H3 as depicted in SEQ ID NO. 140;
(i) CDR-H1 as depicted in SEQ ID NO. 156, CDR-H2 as depicted in SEQ ID NO. 157 and CDR-H3 as depicted in SEQ ID NO. 158; and
(j) CDR-H1 as depicted in SEQ ID NO. 174, CDR-H2 as depicted in SEQ ID NO. 175 and CDR-H3 as depicted in SEQ ID NO. 176.

5. The bispecific single chain antibody molecule according to claim 1, wherein the first binding domain capable of binding to an epitope of human and non-chimpanzee primate CD3E chain comprises a VL region selected from the group consisting of a VL region as depicted in SEQ ID NO. 35, 39, 125, 129, 161 or 165.

6. The bispecific single chain antibody molecule according to claim 1, wherein the first binding domain capable of binding to an epitope of human and non-chimpanzee primate CD3E chain comprises a VH region selected from the group consisting of a VH region as depicted in SEQ ID NO. 15, 19, 33, 37, 51, 55, 69, 73, 87, 91, 105, 109, 123, 127, 141, 145, 159, 163, 177 or 181.

7. The bispecific single chain antibody molecule according to claim 1, wherein the first binding domain capable of binding to an epitope of human and non-chimpanzee primate CD3c chain comprises a VL region and a VH region selected from the group consisting of:
(a) a VL region as depicted in SEQ ID NO. 17 or 21 and a VH region as depicted in SEQ ID NO. 15 or 19;
(b) a VL region as depicted in SEQ ID NO. 35 or 39 and a VH region as depicted in SEQ ID NO. 33 or 37;
(c) a VL region as depicted in SEQ ID NO. 53 or 57 and a VH region as depicted in SEQ ID NO. 51 or 55;
(d) a VL region as depicted in SEQ ID NO. 71 or 75 and a VH region as depicted in SEQ ID NO. 69 or 73;
(e) a VL region as depicted in SEQ ID NO. 89 or 93 and a VH region as depicted in SEQ ID NO. 87 or 91;
(f) a VL region as depicted in SEQ ID NO. 107 or 111 and a VH region as depicted in SEQ ID NO. 105 or 109;
(g) a VL region as depicted in SEQ ID NO. 125 or 129 and a VH region as depicted in SEQ ID NO. 123 or 127;
(h) a VL region as depicted in SEQ ID NO. 143 or 147 and a VH region as depicted in SEQ ID NO. 141 or 145;
(i) a VL region as depicted in SEQ ID NO. 161 or 165 and a VH region as depicted in SEQ ID NO. 159 or 163; and
(j) a VL region as depicted in SEQ ID NO. 179 or 183 and a VH region as depicted in SEQ ID NO. 177 or 181.

8. The bispecific single chain antibody molecule according to claim 7, wherein the first binding domain capable of binding to an epitope of human and non-chimpanzee primate CD3c chain comprises an amino acid sequence selected from the group consisting of SEQ ID NOs: 23, 25, 41, 43, 59, 61, 77, 79, 95, 97, 113, 115, 131, 133, 149, 151, 167, 169, 185 or 187.

9. (canceled)

10. The bispecific single chain antibody molecule according to claim 1, wherein the bispecific single chain antibody molecule comprises a group of the following sequences as CDR H1, CDR H2, CDR H3, CDR L1, CDR L2 and CDR L3 in the second binding domain selected from:
(a) CDR H1-3 of SEQ ID NO: 382-384 and CDR L1-3 of SEQ ID NO: 377-379;
(b) CDR H1-3 of SEQ ID NO: 400-402 and CDR L1-3 of SEQ ID NO: 395-397;
(c) CDR H1-3 of SEQ ID NO: 414-416 and CDR L1-3 of SEQ ID NO: 409-411;
(d) CDR H1-3 of SEQ ID NO: 432-434 and CDR L1-3 of SEQ ID NO: 427-429;
(e) CDR H1-3 of SEQ ID NO: 1215-1217 and CDR L1-3 of SEQ ID NO: 1220 1222;
(f) CDR H1-3 of SEQ ID NO: 1187-1189 and CDR L1-3 of SEQ ID NO: 1192 1194;
(g) CDR H1-3 of SEQ ID NO: 1173-1175 and CDR L1-3 of SEQ ID NO: 1178 1180;
(h) CDR H1-3 of SEQ ID NO: 1229-1231 and CDR L1-3 of SEQ ID NO: 1234 1236;
(i) CDR H1-3 of SEQ ID NO: 1201-1203 and CDR L1-3 of SEQ ID NO: 1206 1208;
(k) CDR H1-3 of SEQ ID NO: 1257-1259 and CDR L1-3 of SEQ ID NO: 1262 1264; and
(l) CDR H1-3 of SEQ ID NO: 1243-1245 and CDR L1-3 of SEQ ID NO: 1248 1250.

11. The bispecific single chain antibody molecule of claim 10, wherein the binding domains are arranged in the order VH PSCA-VL PSCA-VH CD3-VL CD3 or VL PSCA-VH PSCA-VH CD3-VL CD3.

12. The bispecific single chain antibody molecule according to claim 11, wherein the bispecific single chain antibody molecule comprises a sequence selected from:
(a) an amino acid sequence as depicted in any of SEQ ID NOs: 389, 421, 439, 391, 405, 423, 441, 1226, 1198, 1184, 1240, 1212, 1268 or 1254;
(b) an amino acid sequence encoded by a nucleic acid sequence as depicted in any of SEQ ID NOs: 390, 422, 440, 392, 406, 424, 442, 1227, 1199, 1185, 1241, 1213 1269 or 1255; and
(c) an amino acid sequence at least 90 (:)/0 identical, more preferred at least 95′)/0 identical, most preferred at least 9613/0 identical to the amino acid sequence of (a) or (b).

13. (canceled)

14. The bispecific single chain antibody molecule according to claim 1, wherein the bispecific single chain antibody molecule comprises a group of the following sequences as CDR H1, CDR H2, CDR H3, CDR L1, CDR L2 and CDR L3 in the second binding domain selected from:
(a) CDR H1-3 of SEQ ID NO: 478-480 and CDR L1-3 of SEQ ID NO: 473 475;
(b) CDR H1-3 of SEQ ID NO: 530-532 and CDR L1-3 of SEQ ID NO: 525 527;
(c) CDR H1-3 of SEQ ID NO: 518-520 and CDR L1-3 of SEQ ID NO: 513 515; and
(d) CDR H1-3 of SEQ ID NO: 506-508 and CDR L1-3 of SEQ ID NO: 501-503;
(e) CDR H1-3 of SEQ ID NO: 494-496 and CDR L1-3 of SEQ ID NO: 489-491;
(f) CDR H1-3 of SEQ ID NO: 542-544 and CDR L1-3 of SEQ ID NO: 537-539;
(g) CDR H1-3 of SEQ ID NO: 554-556 and CDR L1-3 of SEQ ID NO: 549-551;
(h) CDR H1-3 of SEQ ID NO: 566-568 and CDR L1-3 of SEQ ID NO: 561-563;
(i) CDR H1-3 of SEQ ID NO: 578-580 and CDR L1-3 of SEQ ID NO: 573-575;
(j) CDR H1-3 of SEQ ID NO: 590-592 and CDR L1-3 of SEQ ID NO: 585-587;
(k) CDR H1-3 of SEQ ID NO: 602-604 and CDR L1-3 of SEQ ID NO: 597-599;
(l) CDR H1-3 of SEQ ID NO: 614-616 and CDR L1-3 of SEQ ID NO: 609-611,
(m) CDR H1-3 of SEQ ID NO: 626-628 and CDR L1-3 of SEQ ID NO: 621-623;
(n) CDR H1-3 of SEQ ID NO: 638-640 and CDR L1-3 of SEQ ID NO: 633-635;
(o) CDR H1-3 of SEQ ID NO: 650-652 and CDR L1-3 of SEQ ID NO: 645-647;
(p) CDR H1-3 of SEQ ID NO: 662-664 and CDR L1-3 of SEQ ID NO: 657 659;
(q) CDR H1-3 of SEQ ID NO: 674-676 and CDR L1-3 of SEQ ID NO: 669 671;
(r) CDR H1-3 of SEQ ID NO: 686-688 and CDR L1-3 of SEQ ID NO: 681 683;
(s) CDR H1-3 of SEQ ID NO: 698-700 and CDR L1-3 of SEQ ID NO: 693-695;
(t) CDR H1-3 of SEQ ID NO: 710-712 and CDR L1-3 of SEQ ID NO: 705-707;
(u) CDR H1-3 of SEQ ID NO: 722-724 and CDR L1-3 of SEQ ID NO: 717-719;
(v) CDR H1-3 of SEQ ID NO: 734-736 and CDR L1-3 of SEQ ID NO: 729-731;
(w) CDR H1-3 of SEQ ID NO: 746-748 and CDR L1-3 of SEQ ID NO: 741-743;
(x) CDR H1-3 of SEQ ID NO: 758-760 and CDR L1-3 of SEQ ID NO: 753-755;
(y) CDR H1-3 of SEQ ID NO: 1271-1273 and CDR L1-3 of SEQ ID NO: 1276-1278;
(z) CDR H1-3 of SEQ ID NO: 1285-1287 and CDR L1-3 of SEQ ID NO: 1290-1292;
(aa) CDR H1-3 of SEQ ID NO: 1299-1301 and CDR L1-3 of SEQ ID NO: 1304-1306;
(ab) CDR H1-3 of SEQ ID NO: 1313-1315 and CDR L1-3 of SEQ ID NO: 1318-1320;
(ac) CDR H1-3 of SEQ ID NO: 1327-1329 and CDR L1-3 of SEQ ID NO: 1332-1334;
(ad) CDR H1-3 of SEQ ID NO: 1341-1343 and CDR L1-3 of SEQ ID NO: 1346-1348;
(ae) CDR H1-3 of SEQ ID NO: 1355-1357 and CDR L1-3 of SEQ ID NO: 1360-1362;
(af) CDR H1-3 of SEQ ID NO: 1369-1371 and CDR L1-3 of SEQ ID NO: 1374-1376; and
(ag) CDR H1-3 of SEQ ID NO: 1383-1385 and CDR L1-3 of SEQ ID NO: 1388-1390.

15. The bispecific single chain antibody molecule of claim 14, wherein the binding domains are arranged in the order VH CD19-VL CD19-VH CD3-VL CD3 or VL CD19-VH CD19-VH CD3-VL CD3.

16. The bispecific single chain antibody molecule according to claim 15, wherein the bispecific single chain antibody molecule comprises a sequence selected from:
(a) an amino acid sequence as depicted in any of SEQ ID NOs:481, 485, 483, 533, 521, 509, 497, 545, 557, 569, 581, 593, 605, 617, 629, 641, 653, 665, 677, 689, 701, 713, 725, 737, 749, 761, 1282, 1296, 1310, 1324, 1338, 1352, 1366, 1380 or 1394;
(b) an amino acid sequence encoded by a nucleic acid sequence as depicted in any of SEQ ID NOs: 482, 486, 484, 534, 522, 510, 498, 546, 558, 570, 582, 594, 606, 618, 630, 642, 654, 666, 678, 690, 702, 714, 726, 738, 750, 762, 1283, 1297, 1311, 1325, 1339, 1353, 1367, 1381 or 1395; and
(c) an amino acid sequence at least 90% identical, more preferred at least 95% identical, most preferred at least 96% identical to the amino acid sequence of (a) or (b).

17. (canceled)

18. The bispecific single chain antibody molecule according to claim 1, wherein the bispecific single chain antibody molecule comprises a group of the following sequences as CDR H1, CDR H2, CDR H3, CDR L1, CDR L2 and CDR L3 in the second binding domain selected from:
(a) CDR H1-3 of SEQ ID NO: 821-823 and CDR L1-3 of SEQ ID NO: 816 818;
(b) CDR H1-3 of SEQ ID NO: 836-838 and CDR L1-3 of SEQ ID NO: 833 835;
(c) CDR H1-3 of SEQ ID NO: 845-847 and CDR L1-3 of SEQ ID NO: 840 842; and
(d) CDR H1-3 of SEQ ID NO: 863-865 and CDR L1-3 of SEQ ID NO: 858-860;
(e) CDR H1-3 of SEQ ID NO: 881-883 and CDR L1-3 of SEQ ID NO: 876-878;
(f) CDR H1-3 of SEQ ID NO: 899-901 and CDR L1-3 of SEQ ID NO: 894-896;
(g) CDR H1-3 of SEQ ID NO: 1401-1403 and CDR L1-3 of SEQ ID NO: 1406 1408;
(h) CDR H1-3 of SEQ ID NO: 1415-1417 and CDR L1-3 of SEQ ID NO: 1420 1422;
(i) CDR H1-3 of SEQ ID NO: 1429-1431 and CDR L1-3 of SEQ ID NO: 1434 1436;
(j) CDR H1-3 of SEQ ID NO: 1443-1445 and CDR L1-3 of SEQ ID NO: 1448 1450;
(k) CDR H1-3 of SEQ ID NO: 1457-1459 and CDR L1-3 of SEQ ID NO: 1462 1464;
(l) CDR H1-3 of SEQ ID NO: 1471-1473 and CDR L1-3 of SEQ ID NO: 1476 1478;
(m) CDR H1-3 of SEQ ID NO: 1639-1641 and CDR L1-3 of SEQ ID NO: 1644 1646;
(n) CDR H1-3 of SEQ ID NO: 1625-1627 and CDR L1-3 of SEQ ID NO: 1630 1632;
(o) CDR H1-3 of SEQ ID NO: 1611-1613 and CDR L1-3 of SEQ ID NO: 1616 1618;
(p) CDR H1-3 of SEQ ID NO: 1597-1599 and CDR L1-3 of SEQ ID NO: 1602 1604;
(q) CDR H1-3 of SEQ ID NO: 1569-1571 and CDR L1-3 of SEQ ID NO: 1574 1576;
(r) CDR H1-3 of SEQ ID NO: 1555-1557 and CDR L1-3 of SEQ ID NO: 1560 1562;
(s) CDR H1-3 of SEQ ID NO: 1583-1585 and CDR L1-3 of SEQ ID NO: 1588 1590;
(t) CDR H1-3 of SEQ ID NO: 1541-1543 and CDR L1-3 of SEQ ID NO: 1546 1548;
(u) CDR H1-3 of SEQ ID NO: 1513-1515 and CDR L1-3 of SEQ ID NO: 1518 1520;
(v) CDR H1-3 of SEQ ID NO: 1527-1529 and CDR L1-3 of SEQ ID NO: 1532 1534;
(w) CDR H1-3 of SEQ ID NO: 1499-1501 and CDR L1-3 of SEQ ID NO: 1504 1506; and
(x) CDR H1-3 of SEQ ID NO: 1485-1487 and CDR L1-3 of SEQ ID NO: 1490 1492.

19. The bispecific single chain antibody molecule of claim 18, wherein the binding domains are arranged in the order VH C-MET-VL C-MET-VH CD3-VL CD3 or VL C-MET-VH C-MET-VH CD3-VL CD3.

20. The bispecific single chain antibody molecule according to claim 19, wherein the bispecific single chain antibody molecule comprises a sequence selected from:
(a) an amino acid sequence as depicted in any of SEQ ID NOs: 829, 853, 871, 889, 831, 855, 873, 891, 905, 1412, 1426, 1440, 1454, 1468, 1482, or;
(b) an amino acid sequence encoded by a nucleic acid sequence as depicted in any of SEQ ID NOs: 830, 854, 872, 890, 832, 856, 874, 892, 906, 1413, 1427, 1441, 1455, 1469, or 1483; and
(c) an amino acid sequence at least 90% identical, more preferred at least 95% identical, most preferred at least 96% identical to the amino acid sequence of (a) or (b).

21. (canceled)

22. The bispecific single chain antibody molecule according to claim 1, wherein the bispecific single chain antibody molecule comprises a group of the following sequences as CDR H1, CDR H2, CDR H3, CDR L1, CDR L2 and CDR L3 in the second binding domain selected from:
(a) CDR H1-3 of SEQ ID NO: 1653-1655 and CDR L1-3 of SEQ ID NO: 1658 1660;
(b) CDR H1-3 of SEQ ID NO: 1667-1669 and CDR L1-3 of SEQ ID NO: 1672 1674;
(c) CDR H1-3 of SEQ ID NO: 1681-1683 and CDR L1-3 of SEQ ID NO: 1686 1688; and
(d) CDR H1-3 of SEQ ID NO: 1695-1697 and CDR L1-3 of SEQ ID NO: 1700 1702;
(e) CDR H1-3 of SEQ ID NO: 1709-1711 and CDR L1-3 of SEQ ID NO: 1714 1716; and
(f) CDR H1-3 of SEQ ID NO: 1723-1725 and CDR L1-3 of SEQ ID NO: 1728 1730.

23. The bispecific single chain antibody molecule of claim 22, wherein the binding domains are arranged in the order VH Endosialin-VL Endosialin-VH CD3-VL CD3 or VL Endosialin-VH Endosialin-VH CD3-VL CD3.

24. The bispecific single chain antibody molecule according to claim 23, wherein the bispecific single chain antibody molecule comprises a sequence selected from:
(a) an amino acid sequence as depicted in any of SEQ ID NOs: 1664, 1678, 1692, 1706, 1720, or 1734;
(b) an amino acid sequence encoded by a nucleic acid sequence as depicted in any of SEQ ID NOs: 1665, 1679, 1693, 1707, 1721, or 1735; and
(c) an amino acid sequence at least 90% identical, more preferred at least 95% identical, most preferred at least 96% identical to the amino acid sequence of (a) or (b).

25. (canceled)

26. The bispecific single chain antibody molecule according to claim 1, wherein the bispecific single chain antibody molecule comprises a group of the following sequences as CDR H1, CDR H2, CDR H3, CDR L1, CDR L2 and CDR L3 in the second binding domain selected from:
(a) CDR H1-3 of SEQ ID NO: 940-942 and CDR L1-3 of SEQ ID NO: 935 937;
(b) CDR H1-3 of SEQ ID NO: 956-958 and CDR L1-3 of SEQ ID NO: 951 953;
(c) CDR H1-3 of SEQ ID NO: 968-970 and CDR L1-3 of SEQ ID NO: 963 965;
(d) CDR H1-3 of SEQ ID NO: 980-982 and CDR L1-3 of SEQ ID NO: 975977;
(e) CDR H1-3 of SEQ ID NO: 992-994 and CDR L1-3 of SEQ ID NO: 987-989;
(f) CDR H1-3 of SEQ ID NO: 1004-1006 and CDR L1-3 of SEQ ID NO: 999-1001;
(g) CDR H1-3 of SEQ ID NO: 1028-1030 and CDR L1-3 of SEQ ID NO: 1023 1025;
(h) CDR H1-3 of SEQ ID NO: 1040-1042 and CDR L1-3 of SEQ ID NO: 1035 1037;
(i) CDR H1-3 of SEQ ID NO: 1052-1054 and CDR L1-3 of SEQ ID NO: 1047 1049;
(j) CDR H1-3 of SEQ ID NO: 1074-1076 and CDR L1-3 of SEQ ID NO: 1069 1071;
(k) CDR H1-3 of SEQ ID NO: 1086-1088 and CDR L1-3 of SEQ ID NO: 1081 1083;
(l) CDR H1-3 of SEQ ID NO: 1098-1000 and CDR L1-3 of SEQ ID NO: 1093 1095;
(m) CDR H1-3 of SEQ ID NO: 1110-1112 and CDR L1-3 of SEQ ID NO: 1105 1107;
(n) CDR H1-3 of SEQ ID NO: 1122-1124 and CDR L1-3 of SEQ ID NO: 1117 1119;
(o) CDR H1-3 of SEQ ID NO: 1016-1018 and CDR L1-3 of SEQ ID NO: 1011 1013; and
(p) CDR H1-3 of SEQ ID NO: 1765-1767 and CDR L1-3 of SEQ ID NO: 1770 1772.

27. The bispecific single chain antibody molecule of claim 26, wherein the binding domains are arranged in the order VH EpCAM-VL EpCAM-VH CD3-VL CD3 or VL EpCAM-VH EpCAM-VH CD3-VL CD3.

28. The bispecific single chain antibody molecule according to claim 27, wherein the bispecific single chain antibody molecule comprises a sequence selected from:
(a) an amino acid sequence as depicted in any of SEQ ID NOs: 944, 948, 946, 960, 972, 984, 996, 1008, 1032, 1044, 1056, 1078, 1090, 1102, 1114, 1126, 1020, or 1776;
(b) an amino acid sequence encoded by a nucleic acid sequence as depicted in any of SEQ ID NOs: 945, 949, 947, 961, 973, 985, 979, 1009, 1033, 1045, 1057, 1079, 1091, 1103, 1115, 1127, 1021, or 1777; and
(c) an amino acid sequence at least 90% identical, more preferred at least 95% identical, most preferred at least 96% identical to the amino acid sequence of (a) or (b).

29. (canceled)

30. The bispecific single chain antibody molecule according to claim 1, wherein the bispecific single chain antibody molecule comprises a group of the following sequences as CDR H1, CDR H2, CDR H3, CDR L1, CDR L2 and CDR L3 in the second binding domain selected from:
(a) CDR H1-3 of SEQ ID NO: 1137-1139 and CDR L1-3 of SEQ ID NO: 1132-1134;
(b) CDR H1-3 of SEQ ID NO: 1849-1851and CDR L1-3 of SEQ ID NO: 1854 1856;
(c) CDR H1-3 of SEQ ID NO: 1835-1837and CDR L1-3 of SEQ ID NO: 1840 1842;
(d) CDR H1-3 of SEQ ID NO: 1779-1781and CDR L1-3 of SEQ ID NO: 1784 1786;
(e) CDR H1-3 of SEQ ID NO: 1793-1795 and CDR L1-3 of SEQ ID NO: 1798 1800;
(f) CDR H1-3 of SEQ ID NO: 1863-1865 and CDR L1-3 of SEQ ID NO: 1868 1870;
(g) CDR H1-3 of SEQ ID NO: 1807-1809 and CDR L1-3 of SEQ ID NO: 1812 1814;
(h) CDR H1-3 of SEQ ID NO: 1821-1823 and CDR L1-3 of SEQ ID NO: 1826 1828;
(i) CDR H1-3 of SEQ ID NO: 1891-1893 and CDR L1-3 of SEQ ID NO: 1896 1898;
(j) CDR H1-3 of SEQ ID NO: 1877-1879 and CDR L1-3 of SEQ ID NO: 1882 1884;
(k) CDR H1-3 of SEQ ID NO: 1961-1963 and CDR L1-3 of SEQ ID NO: 1966 1968;
(l) CDR H1-3 of SEQ ID NO: 1947-1949 and CDR L1-3 of SEQ ID NO: 1952-1954;
(m) CDR H1-3 of SEQ ID NO: 1975-1977 and CDR L1-3 of SEQ ID NO: 1980 1982;
(n) CDR H1-3 of SEQ ID NO: 1933-1935 and CDR L1-3 of SEQ ID NO: 1938 1940;
(o) CDR H1-3 of SEQ ID NO: 1919-1921 and CDR L1-3 of SEQ ID NO: 1924 1926; and
(p) CDR H1-3 of SEQ ID NO: 1905-1907 and CDR L1-3 of SEQ ID NO: 1910 1912.

31. The bispecific single chain antibody molecule of claim 30, wherein the binding domains are arranged in the order VH FAP alpha-VL FAP alpha-VH CD3-VL CD3 or VL FAP alpha-VH FAP alpha-VH CD3-VL CD3.

32. The bispecific single chain antibody molecule according to claim 31, wherein the bispecific single chain antibody molecule comprises a sequence selected from:
(a) an amino acid sequence as depicted in any of SEQ ID NOs: 1143, 1147, 1145, 1860, 1846, 1790, 1804, 1874, 1818, or 1832;
(b) an amino acid sequence encoded by a nucleic acid sequence as depicted in any of SEQ ID NOs: 1144, 1148, 1146, 1861, 1847, 1791, 1805, 1875, 1818 or 1833; and
(c) an amino acid sequence at least 90% identical, more preferred at least 95% identical, most preferred at least 96% identical to the amino acid sequence of (a) or (b).

33. The bispecific single chain antibody molecule according to claim 1, wherein the second binding domain is capable of binding to human Insulin-like growth factor I receptor (IGF-IR or IGF-1R), and/or a non-Chimpanzee primate IGF-1R.

34. The bispecific single chain antibody molecule according to claim 33, wherein the bispecific single chain antibody molecule comprises a group of the following sequences as CDR H1, CDR H2, CDR H3, CDR L1, CDR L2 and CDR L3 in the second binding domain selected from:
(a) CDR H1-3 of SEQ ID NO: 2016-2018and CDR L1-3 of SEQ ID NO: 2021 2023;
(b) CDR H1-3 of SEQ ID NO: 2030-2032 and CDR L1-3 of SEQ ID NO: 2035-2037;
(c) CDR H1-3 of SEQ ID NO: 2044-2046 and CDR L1-3 of SEQ ID NO: 2049 2051;
(d) CDR H1-3 of SEQ ID NO: 2058-2060 and CDR L1-3 of SEQ ID NO: 2063 2065;
(e) CDR H1-3 of SEQ ID NO: 2072-2074 and CDR L1-3 of SEQ ID NO: 2077 2079;
(f) CDR H1-3 of SEQ ID NO: 2086-2088 and CDR L1-3 of SEQ ID NO: 2091 2093;
(g) CDR H1-3 of SEQ ID NO: 2100-2102 and CDR L1-3 of SEQ ID NO: 2105 2107;
(h) CDR H1-3 of SEQ ID NO: 2114-2116 and CDR L1-3 of SEQ ID NO: 2119 2121;
(i) CDR H1-3 of SEQ ID NO: 2128-2130 and CDR L1-3 of SEQ ID NO: 2133 2135;
(j) CDR H1-3 of SEQ ID NO: 2142-2144 and CDR L1-3 of SEQ ID NO: 2147 2149;
(k) CDR H1-3 of SEQ ID NO: 2156-2158 and CDR L1-3 of SEQ ID NO: 2161 2163;
(l) CDR H1-3 of SEQ ID NO: 2170-2172 and CDR L1-3 of SEQ ID NO: 2175 2177;
(m) CDR H1-3 of SEQ ID NO: 2184-2186 and CDR L1-3 of SEQ ID NO: 2189 2191;
(n) CDR H1-3 of SEQ ID NO: 2198-2200 and CDR L1-3 of SEQ ID NO: 2203 2205; and
(o) CDR H1-3 of SEQ ID NO: 2212-2214 and CDR L1-3 of SEQ ID NO: 2217 2219.

35. The bispecific single chain antibody molecule of claim 34, wherein the binding domains are arranged in the order VH IGF-1R-VL IGF-1R-VH CD3-VL CD3 or VL IGF-1R-VH IGF-1R-VH CD3-VL CD3.

36. The bispecific single chain antibody molecule according to claim 35, wherein the bispecific single chain antibody molecule comprises a sequence selected from:
(a) an amino acid sequence as depicted in any of SEQ ID NOs: 2027, 2041, 2055, 2069, 2083, 2097, 2111, 2125, 2139, 2153, 2167, 2181, 2195, 2209, or 2223;
(b) an amino acid sequence encoded by a nucleic acid sequence as depicted in any of SEQ ID NOs: 2028, 2042, 2056, 2070, 2084, 2098, 2112, 2126, 2140, 2154, 2168, 2182, 2196, 2210, or 2224; and
(c) an amino acid sequence at least 90% identical, more preferred at least 95% identical, most preferred at least 96% identical to the amino acid sequence of (a) or (b).

37. A nucleic acid sequence encoding the bispecific single chain antibody molecule according to claim 1.

38. A vector comprising the nucleic acid sequence according to claim 37.

39-40. (canceled)

41. A host transformed or transfected with the vector according to claim 38.

42. A process for producing a bispecific single chain antibody molecule, said process comprising culturing the host according to claim 41 under conditions allowing the expression of the bispecific single chain antibody molecule.

43. A pharmaceutical composition comprising the bispecific single chain antibody molecule according to claim 1.

44-51. (canceled)

52. A method for preventing, treating, or ameliorating a cancer in a subject in the need thereof, said method comprising the step of administering an effective amount of the bispecific single chain antibody according to claim 1.

53. (canceled)

54. The method of claim 52, wherein said cancer is/are
(a) prostate cancer, bladder cancer or pancreatic cancer;
(b) a B-cell malignancy, such as B-NHL (B cell non-Hodgkin Lymphoma), BALL (acute lymphoblastic B cell leukemia), B-CLL (chronic lymphocytic B cell leukemia), or Multiple Myeloma;
(c) a carcinoma, sarcoma, glioblastoma/astrocytoma, melanoma,
mesothelioma, Wilms tumor or a hematopoietic malignancy such as leukemia, lymphoma or multiple myeloma;
(d) carcinomas (breast, kidney, lung, colorectal, colon, pancreas mesothelioma), sarcomas, and neuroectodermal tumors (melanoma, glioma, neuroblastoma);
(e) epithelial cancer or a minimal residual cancer;
(f) epithelial cancer; or
(g) bone or soft tissue cancer (e.g. Ewing sarcoma), breast, liver, lung, head and neck, colorectal, prostate, leiomyosarcoma, cervical and endometrial cancer, ovarian, prostate, and pancreatic cancer.

55-58. (canceled)

The application's sequence listing, which the Patent Office published only in electronic form, follows.

SEQUENCE LISTING (2235 sequences)

SEQ ID NO: 1 - protein, 105 aa, Homo sapiens
QDGNEEMGGITQTPYKVSISGTTVILTCPQYPGSEILWQHNDKNIGGDEDDKNIGSDEDHLSLKEFSELEQSGYYVCYPRGSKPEDANFYLYLRARVCENCMEMD

SEQ ID NO: 2 - protein, 27 aa, Homo sapiens
QDGNEEMGGITQTPYKVSISGTTVILT

SEQ ID NO: 3 - protein, 96 aa, Callithrix jacchus
QDGNEEMGDTTQNPYKVSISGTTVTLTCPRYDGHEIKWLVNSQNKEGHEDHLLLEDFSEMEQSGYYACLSKETPAEEASHYLYLKARVCENCVEVD

SEQ ID NO: 4 - protein, 27 aa, Callithrix jacchus
QDGNEEMGDTTQNPYKVSISGTTVTLT

SEQ ID NO: 5 - protein, 96 aa, Saguinus oedipus; identical to SEQ ID NO: 3

SEQ ID NO: 6 - protein, 27 aa, Saguinus oedipus
QDGNEEMGDTTQNPYKVSISGTTVTLT

SEQ ID NO: 7 - protein, 96 aa, Saimiri sciureus
QDGNEEIGDTTQNPYKVSISGTTVTLTCPRYDGQEIKWLVNDQNKEGHEDHLLLEDFSEMEQSGYYACLSKETPTEEASHYLYLKARVCENCVEVD

SEQ ID NO: 8 - protein, 27 aa, Saminiri sciureus
QDGNEEIGDTTQNPYKVSISGTTVTLT

SEQ ID NO: 9 - protein, 14 aa, Artificial Sequence
  CDR-L1 of F6A
GSSTGAVTSGYYPN

SEQ ID NO: 10 - protein, 7 aa, Artificial Sequence
  CDR-L2 of F6A
GTKFLAP

SEQ ID NO: 11 - protein, 9 aa, Artificial Sequence
  CDR-L3 of F6A
ALWYSNRWV

SEQ ID NO: 12 - protein, 5 aa, Artificial Sequence
  CDR-H1 of F6A
IYAMN

SEQ ID NO: 13 - protein, 19 aa, Artificial Sequence
  CDR-H2 of F6A
RIRSKYNNYATYYADSVKS

SEQ ID NO: 14 - protein, 14 aa, Artificial Sequence
  CDR-H3 of F6A
HGNFGNSYVSFFAY

SEQ ID NO: 15 - protein, 125 aa, Artificial Sequence
  VH of F6A
EVQLVESGGGLVQPGGSLKLSCAASGFTFNIYAMNWVRQAPGKGLEWVARIRSKYNNYATYYADSVKSRFTISRDDSKNTAYLQMNNLKTEDTAVYYCVRHGNFGNSYVSFFAYWGQGTLVTVSS

SEQ ID NO: 16 - DNA, 375 bp, Artificial Sequence
  VH of F6A
gaggtgcagctggtcgagtctggaggaggattggtgcagcctggagggtcattgaaactctcatgtgcagcctctggattcaccttcaatatctacgccatgaactgggtccgccaggctccaggaaagggtttggaatgggttgctcgcataagaagtaaatataataattatgcaacatattatgccgattcagtgaaaagcaggttcaccatctccagagatgattcaaaaaacactgcctatctacaaatgaacaacttgaaaactgaggacactgccgtgtactactgtgtgagacatgggaacttcggtaatagctacgtatccttcttcgcttactggggccaagggactctggtcaccgtctcctca

SEQ ID NO: 17 - protein, 109 aa, Artificial Sequence
  VL of F6A
QTVVTQEPSLTVSPGGTVTLTCGSSTGAVTSGYYPNWVQQKPGQAPRGLIGGTKFLAPGTPARFSGSLLGGKAALTLSGVQPEDEAEYYCALWYSNRWVFGGGTKLTVL

SEQ ID NO: 18 - DNA, 327 bp, Artificial Sequence
  VL of F6A
cagactgttgtgactcaggaaccttcactcaccgtatcacctggtggaacagtcacactcacttgtggctcctcgactggggctgttacatctggctactacccaaactgggtccaacaaaaaccaggtcaggcaccccgtggtctaataggtgggactaagttcctcgcccccggtactcctgccagattctcaggctccctgcttggaggcaaggctgccctcaccctctcaggggtacagccagaggatgaggcagaatattactgtgctctatggtacagcaaccgctgggtgttcggtggaggaaccaaactgactgtccta

SEQ ID NO: 19 - protein, 125 aa, Artificial Sequence
  VH-P of F6A
EVQLLESGGGLVQPGGSLKLSCAASGFTFNIYAMNWVRQAPGKGLEWVARIRSKYNNYATYYADSVKSRFTISRDDSKNTAYLQMNNLKTEDTAVYYCVRHGNFGNSYVSFFAYWGQGTLVTVSS

SEQ ID NO: 20 - DNA, 375 bp, Artificial Sequence
  VH-P of F6A
gaggtgcagctgctcgagtctggaggaggattggtgcagcctggagggtcattgaaactctcatgtgcagcctctggattcaccttcaatatctacgccatgaactgggtccgccaggctccaggaaagggtttggaatgggttgctcgcataagaagtaaatataataattatgcaacatattatgccgattcagtgaaaagcaggttcaccatctccagagatgattcaaaaaacactgcctatctacaaatgaacaacttgaaaactgaggacactgccgtgtactactgtgtgagacatgggaacttcggtaatagctacgtatccttcttcgcttactggggccaagggactctggtcaccgtctcctca

SEQ ID NO: 21 - protein, 109 aa, Artificial Sequence
  VL-P of F6A
ELVVTQEPSLTVSPGGTVTLTCGSSTGAVTSGYYPNWVQQKPGQAPRGLIGGTKFLAPGTPARFSGSLLGGKAALTLSGVQPEDEAEYYCALWYSNRWVFGGGTKLTVL

SEQ ID NO: 22 - DNA, 327 bp, Artificial Sequence
  VL-P of F6A
gagctcgttgtgactcaggaaccttcactcaccgtatcacctggtggaacagtcacactcacttgtggctcctcgactggggctgttacatctggctactacccaaactgggtccaacaaaaaccaggtcaggcaccccgtggtctaataggtgggactaagttcctcgcccccggtactcctgccagattctcaggctccctgcttggaggcaaggctgccctcaccctctcaggggtacagccagaggatgaggcagaatattactgtgctctatggtacagcaaccgctgggtgttcggtggaggaaccaaactgactgtccta

SEQ ID NO: 23 - protein, 249 aa, Artificial Sequence
  VH-VL of F6A
EVQLVESGGGLVQPGGSLKLSCAASGFTFNIYAMNWVRQAPGKGLEWVARIRSKYNNYATYYADSVKSRFTISRDDSKNTAYLQMNNLKTEDTAVYYCVRHGNFGNSYVSFFAYWGQGTLVTVSSGGGGSGGGGSGGGGSQTVVTQEPSLTVSPGGTVTLTCGSSTGAVTSGYYPNWVQQKPGQAPRGLIGGTKFLAPGTPARFSGSLLGGKAALTLSGVQPEDEAEYYCALWYSNRWVFGGGTKLTVL

SEQ ID NO: 24 - DNA, 747 bp, Artificial Sequence
  VH-VL of F6A
gaggtgcagctggtcgagtctggaggaggattggtgcagcctggagggtcattgaaactctcatgtgcagcctctggattcaccttcaatatctacgccatgaactgggtccgccaggctccaggaaagggtttggaatgggttgctcgcataagaagtaaatataataattatgcaacatattatgccgattcagtgaaaagcaggttcaccatctccagagatgattcaaaaaacactgcctatctacaaatgaacaacttgaaaactgaggacactgccgtgtactactgtgtgagacatgggaacttcggtaatagctacgtatccttcttcgcttactggggccaagggactctggtcaccgtctcctcaggtggtggtggttctggcggcggcggctccggtggtggtggttctcagactgttgtgactcaggaaccttcactcaccgtatcacctggtggaacagtcacactcacttgtggctcctcgactggggctgttacatctggctactacccaaactgggtccaacaaaaaccaggtcaggcaccccgtggtctaataggtgggactaagttcctcgcccccggtactcctgccagattctcaggctccctgcttggaggcaaggctgccctcaccctctcaggggtacagccagaggatgaggcagaatattactgtgctctatggtacagcaaccgctgggtgttcggtggaggaaccaaactgactgtccta

SEQ ID NO: 25 - protein, 249 aa, Artificial Sequence
  VH-VL-P of F6A
EVQLLESGGGLVQPGGSLKLSCAASGFTFNIYAMNWVRQAPGKGLEWVARIRSKYNNYATYYADSVKSRFTISRDDSKNTAYLQMNNLKTEDTAVYYCVRHGNFGNSYVSFFAYWGQGTLVTVSSGGGGSGGGGSGGGGSELVVTQEPSLTVSPGGTVTLTCGSSTGAVTSGYYPNWVQQKPGQAPRGLIGGTKFLAPGTPARFSGSLLGGKAALTLSGVQPEDEAEYYCALWYSNRWVFGGGTKLTVL

SEQ ID NO: 26 - DNA, 747 bp, Artificial Sequence
  VH-VL-P of F6A
gaggtgcagctgctcgagtctggaggaggattggtgcagcctggagggtcattgaaactctcatgtgcagcctctggattcaccttcaatatctacgccatgaactgggtccgccaggctccaggaaagggtttggaatgggttgctcgcataagaagtaaatataataattatgcaacatattatgccgattcagtgaaaagcaggttcaccatctccagagatgattcaaaaaacactgcctatctacaaatgaacaacttgaaaactgaggacactgccgtgtactactgtgtgagacatgggaacttcggtaatagctacgtatccttcttcgcttactggggccaagggactctggtcaccgtctcctcaggtggtggtggttctggcggcggcggctccggtggtggtggttctgagctcgttgtgactcaggaaccttcactcaccgtatcacctggtggaacagtcacactcacttgtggctcctcgactggggctgttacatctggctactacccaaactgggtccaacaaaaaccaggtcaggcaccccgtggtctaataggtgggactaagttcctcgcccccggtactcctgccagattctcaggctccctgcttggaggcaaggctgccctcaccctctcaggggtacagccagaggatgaggcagaatattactgtgctctatggtacagcaaccgctgggtgttcggtggaggaaccaaactgactgtccta

SEQ ID NO: 27 - protein, 14 aa, Artificial Sequence
  CDR-L1 of H2C
GSSTGAVTSGYYPN

SEQ ID NO: 28 - protein, 7 aa, Artificial Sequence
  CDR-L2 of H2C
GTKFLAP

SEQ ID NO: 29 - protein, 9 aa, Artificial Sequence
  CDR-L3 of H2C
ALWYSNRWV

SEQ ID NO: 30 - protein, 5 aa, Artificial Sequence
  CDR-H1 of H2C
KYAMN

SEQ ID NO: 31 - protein, 19 aa, Artificial Sequence
  CDR-H2 of H2C
RIRSKYNNYATYYADSVKD

SEQ ID NO: 32 - protein, 14 aa, Artificial Sequence
  CDR-H3 of H2C
HGNFGNSYISYWAY

SEQ ID NO: 33 - protein, 125 aa, Artificial Sequence
  VH of H2C
EVQLVESGGGLVQPGGSLKLSCAASGFTFNKYAMNWVRQAPGKGLEWVARIRSKYNNYATYYADSVKDRFTISRDDSKNTAYLQMNNLKTEDTAVYYCVRHGNFGNSYISYWAYWGQGTLVTVSS

SEQ ID NO: 34 - DNA, 375 bp, Artificial Sequence
  VH of H2C
gaggtgcagctggtcgagtctggaggaggattggtgcagcctggagggtcattgaaactctcatgtgcagcctctggattcaccttcaataagtacgccatgaactgggtccgccaggctccaggaaagggtttggaatgggttgctcgcataagaagtaaatataataattatgcaacatattatgccgattcagtgaaagacaggttcaccatctccagagatgattcaaaaaacactgcctatctacaaatgaacaacttgaaaactgaggacactgccgtgtactactgtgtgagacatgggaacttcggtaatagctacatatcctactgggcttactggggccaagggactctggtcaccgtctcctca

SEQ ID NO: 35 - protein, 109 aa, Artificial Sequence; identical to SEQ ID NO: 17
  VL of H2C

SEQ ID NO: 36 - DNA, 327 bp, Artificial Sequence; identical to SEQ ID NO: 18
  VL of H2C

SEQ ID NO: 37 - protein, 125 aa, Artificial Sequence
  VH-P of H2C
EVQLLESGGGLVQPGGSLKLSCAASGFTFNKYAMNWVRQAPGKGLEWVARIRSKYNNYATYYADSVKDRFTISRDDSKNTAYLQMNNLKTEDTAVYYCVRHGNFGNSYISYWAYWGQGTLVTVSS

SEQ ID NO: 38 - DNA, 375 bp, Artificial Sequence
  VH-P of H2C
gaggtgcagctgctcgagtctggaggaggattggtgcagcctggagggtcattgaaactctcatgtgcagcctctggattcaccttcaataagtacgccatgaactgggtccgccaggctccaggaaagggtttggaatgggttgctcgcataagaagtaaatataataattatgcaacatattatgccgattcagtgaaagacaggttcaccatctccagagatgattcaaaaaacactgcctatctacaaatgaacaacttgaaaactgaggacactgccgtgtactactgtgtgagacatgggaacttcggtaatagctacatatcctactgggcttactggggccaagggactctggtcaccgtctcctca

SEQ ID NO: 39 - protein, 109 aa, Artificial Sequence; identical to SEQ ID NO: 21
  VL-P of H2C

SEQ ID NO: 40 - DNA, 327 bp, Artificial Sequence; identical to SEQ ID NO: 22
  VL-P of H2C

SEQ ID NO: 41 - protein, 249 aa, Artificial Sequence
  VH-VL of H2C
EVQLVESGGGLVQPGGSLKLSCAASGFTFNKYAMNWVRQAPGKGLEWVARIRSKYNNYATYYADSVKDRFTISRDDSKNTAYLQMNNLKTEDTAVYYCVRHGNFGNSYISYWAYWGQGTLVTVSSGGGGSGGGGSGGGGSQTVVTQEPSLTVSPGGTVTLTCGSSTGAVTSGYYPNWVQQKPGQAPRGLIGGTKFLAPGTPARFSGSLLGGKAALTLSGVQPEDEAEYYCALWYSNRWVFGGGTKLTVL

SEQ ID NO: 42 - DNA, 747 bp, Artificial Sequence
  VH-VL of H2C
gaggtgcagctggtcgagtctggaggaggattggtgcagcctggagggtcattgaaactctcatgtgcagcctctggattcaccttcaataagtacgccatgaactgggtccgccaggctccaggaaagggtttggaatgggttgctcgcataagaagtaaatataataattatgcaacatattatgccgattcagtgaaagacaggttcaccatctccagagatgattcaaaaaacactgcctatctacaaatgaacaacttgaaaactgaggacactgccgtgtactactgtgtgagacatgggaacttcggtaatagctacatatcctactgggcttactggggccaagggactctggtcaccgtctcctcaggtggtggtggttctggcggcggcggctccggtggtggtggttctcagactgttgtgactcaggaaccttcactcaccgtatcacctggtggaacagtcacactcacttgtggctcctcgactggggctgttacatctggctactacccaaactgggtccaacaaaaaccaggtcaggcaccccgtggtctaataggtgggactaagttcctcgcccccggtactcctgccagattctcaggctccctgcttggaggcaaggctgccctcaccctctcaggggtacagccagaggatgaggcagaatattactgtgctctatggtacagcaaccgctgggtgttcggtggaggaaccaaactgactgtccta

SEQ ID NO: 43 - protein, 249 aa, Artificial Sequence
  VH-VL-P of H2C
EVQLLESGGGLVQPGGSLKLSCAASGFTFNKYAMNWVRQAPGKGLEWVARIRSKYNNYATYYADSVKDRFTISRDDSKNTAYLQMNNLKTEDTAVYYCVRHGNFGNSYISYWAYWGQGTLVTVSSGGGGSGGGGSGGGGSELVVTQEPSLTVSPGGTVTLTCGSSTGAVTSGYYPNWVQQKPGQAPRGLIGGTKFLAPGTPARFSGSLLGGKAALTLSGVQPEDEAEYYCALWYSNRWVFGGGTKLTVL

SEQ ID NO: 44 - DNA, 747 bp, Artificial Sequence
  VH-VL-P of H2C
gaggtgcagctgctcgagtctggaggaggattggtgcagcctggagggtcattgaaactctcatgtgcagcctctggattcaccttcaataagtacgccatgaactgggtccgccaggctccaggaaagggtttggaatgggttgctcgcataagaagtaaatataataattatgcaacatattatgccgattcagtgaaagacaggttcaccatctccagagatgattcaaaaaacactgcctatctacaaatgaacaacttgaaaactgaggacactgccgtgtactactgtgtgagacatgggaacttcggtaatagctacatatcctactgggcttactggggccaagggactctggtcaccgtctcctcaggtggtggtggttctggcggcggcggctccggtggtggtggttctgagctcgttgtgactcaggaaccttcactcaccgtatcacctggtggaacagtcacactcacttgtggctcctcgactggggctgttacatctggctactacccaaactgggtccaacaaaaaccaggtcaggcaccccgtggtctaataggtgggactaagttcctcgcccccggtactcctgccagattctcaggctccctgcttggaggcaaggctgccctcaccctctcaggggtacagccagaggatgaggcagaatattactgtgctctatggtacagcaaccgctgggtgttcggtggaggaaccaaactgactgtccta

SEQ ID NO: 45 - protein, 14 aa, Artificial Sequence
  CDR-L1 of H1E
GSSTGAVTSGYYPN

SEQ ID NO: 46 - protein, 7 aa, Artificial Sequence
  CDR-L2 of H1E
GTKFLAP

SEQ ID NO: 47 - protein, 9 aa, Artificial Sequence
  CDR-L3 of H1E
ALWYSNRWV

SEQ ID NO: 48 - protein, 5 aa, Artificial Sequence
  CDR-H1 of H1E
SYAMN

SEQ ID NO: 49 - protein, 19 aa, Artificial Sequence
  CDR-H2 of H1E
RIRSKYNNYATYYADSVKG

SEQ ID NO: 50 - protein, 14 aa, Artificial Sequence
  CDR-H3 of H1E
HGNFGNSYLSFWAY

SEQ ID NO: 51 - protein, 125 aa, Artificial Sequence
  VH of H1E
EVQLVESGGGLEQPGGSLKLSCAASGFTFNSYAMNWVRQAPGKGLEWVARIRSKYNNYATYYADSVKGRFTISRDDSKNTAYLQMNNLKTEDTAVYYCVRHGNFGNSYLSFWAYWGQGTLVTVSS

SEQ ID NO: 52 - DNA, 374 bp, Artificial Sequence
  VH of H1E
gaggtgcagctggtcgagtctggaggaggattggagcagcctggagggtcattgaaactctcatgtgcagcctctggattcaccttcaattcgtacgccatgaactgggtccgccaggctccaggaaagggtttggaatgggttgctcgcataagaagtaaatataataattatgcaacatattatgccgattcagtgaaagggaggttcaccatctccagagatgattcaaaaaacactgcctatctacaaatgaacaacttgaaaactgaggacactgccgtgtactactgtgtgagacatgggaacttcggtaatagctacctatccttctgggcttactggggccaagggactctggtcaccgtctcctc

SEQ ID NO: 53 - protein, 109 aa, Artificial Sequence; identical to SEQ ID NO: 17
  VL of H1E

SEQ ID NO: 54 - DNA, 327 bp, Artificial Sequence; identical to SEQ ID NO: 18
  VL of H1E

SEQ ID NO: 55 - protein, 125 aa, Artificial Sequence
  VH-P of H1E
EVQLLESGGGLEQPGGSLKLSCAASGFTFNSYAMNWVRQAPGKGLEWVARIRSKYNNYATYYADSVKGRFTISRDDSKNTAYLQMNNLKTEDTAVYYCVRHGNFGNSYLSFWAYWGQGTLVTVSS

SEQ ID NO: 56 - DNA, 375 bp, Artificial Sequence
  VH-P of H1E
gaggtgcagctgctcgagtctggaggaggattggagcagcctggagggtcattgaaactctcatgtgcagcctctggattcaccttcaattcgtacgccatgaactgggtccgccaggctccaggaaagggtttggaatgggttgctcgcataagaagtaaatataataattatgcaacatattatgccgattcagtgaaagggaggttcaccatctccagagatgattcaaaaaacactgcctatctacaaatgaacaacttgaaaactgaggacactgccgtgtactactgtgtgagacatgggaacttcggtaatagctacctatccttctgggcttactggggccaagggactctggtcaccgtctcctca

SEQ ID NO: 57 - protein, 109 aa, Artificial Sequence; identical to SEQ ID NO: 21
  VL-P of H1E

SEQ ID NO: 58 - DNA, 327 bp, Artificial Sequence; identical to SEQ ID NO: 22
  VL-P of H1E

SEQ ID NO: 59 - protein, 249 aa, Artificial Sequence
  VH-VL of H1E
EVQLVESGGGLEQPGGSLKLSCAASGFTFNSYAMNWVRQAPGKGLEWVARIRSKYNNYATYYADSVKGRFTISRDDSKNTAYLQMNNLKTEDTAVYYCVRHGNFGNSYLSFWAYWGQGTLVTVSSGGGGSGGGGSGGGGSQTVVTQEPSLTVSPGGTVTLTCGSSTGAVTSGYYPNWVQQKPGQAPRGLIGGTKFLAPGTPARFSGSLLGGKAALTLSGVQPEDEAEYYCALWYSNRWVFGGGTKLTVL

SEQ ID NO: 60 - DNA, 747 bp, Artificial Sequence
  VH-VL of H1E
gaggtgcagctggtcgagtctggaggaggattggagcagcctggagggtcattgaaactctcatgtgcagcctctggattcaccttcaattcgtacgccatgaactgggtccgccaggctccaggaaagggtttggaatgggttgctcgcataagaagtaaatataataattatgcaacatattatgccgattcagtgaaagggaggttcaccatctccagagatgattcaaaaaacactgcctatctacaaatgaacaacttgaaaactgaggacactgccgtgtactactgtgtgagacatgggaacttcggtaatagctacctatccttctgggcttactggggccaagggactctggtcaccgtctcctcaggtggtggtggttctggcggcggcggctccggtggtggtggttctcagactgttgtgactcaggaaccttcactcaccgtatcacctggtggaacagtcacactcacttgtggctcctcgactggggctgttacatctggctactacccaaactgggtccaacaaaaaccaggtcaggcaccccgtggtctaataggtgggactaagttcctcgcccccggtactcctgccagattctcaggctccctgcttggaggcaaggctgccctcaccctctcaggggtacagccagaggatgaggcagaatattactgtgctctatggtacagcaaccgctgggtgttcggtggaggaaccaaactgactgtccta

SEQ ID NO: 61 - protein, 249 aa, Artificial Sequence
  VH-VL-P of H1E
EVQLLESGGGLEQPGGSLKLSCAASGFTFNSYAMNWVRQAPGKGLEWVARIRSKYNNYATYYADSVKGRFTISRDDSKNTAYLQMNNLKTEDTAVYYCVRHGNFGNSYLSFWAYWGQGTLVTVSSGGGGSGGGGSGGGGSELVVTQEPSLTVSPGGTVTLTCGSSTGAVTSGYYPNWVQQKPGQAPRGLIGGTKFLAPGTPARFSGSLLGGKAALTLSGVQPEDEAEYYCALWYSNRWVFGGGTKLTVL

SEQ ID NO: 62 - DNA, 747 bp, Artificial Sequence
  VH-VL-P of H1E
gaggtgcagctgctcgagtctggaggaggattggagcagcctggagggtcattgaaactctcatgtgcagcctctggattcaccttcaattcgtacgccatgaactgggtccgccaggctccaggaaagggtttggaatgggttgctcgcataagaagtaaatataataattatgcaacatattatgccgattcagtgaaagggaggttcaccatctccagagatgattcaaaaaacactgcctatctacaaatgaacaacttgaaaactgaggacactgccgtgtactactgtgtgagacatgggaacttcggtaatagctacctatccttctgggcttactggggccaagggactctggtcaccgtctcctcaggtggtggtggttctggcggcggcggctccggtggtggtggttctgagctcgttgtgactcaggaaccttcactcaccgtatcacctggtggaacagtcacactcacttgtggctcctcgactggggctgttacatctggctactacccaaactgggtccaacaaaaaccaggtcaggcaccccgtggtctaataggtgggactaagttcctcgcccccggtactcctgccagattctcaggctccctgcttggaggcaaggctgccctcaccctctcaggggtacagccagaggatgaggcagaatattactgtgctctatggtacagcaaccgctgggtgttcggtggaggaaccaaactgactgtccta

SEQ ID NO: 63 - protein, 14 aa, Artificial Sequence
  CDR-L1 of G4H
GSSTGAVTSGYYPN

SEQ ID NO: 64 - protein, 7 aa, Artificial Sequence
  CDR-L2 of G4H
GTKFLAP

SEQ ID NO: 65 - protein, 9 aa, Artificial Sequence
  CDR-L3 of G4H
ALWYSNRWV

SEQ ID NO: 66 - protein, 5 aa, Artificial Sequence
  CDR-H1 of G4H
RYAMN

SEQ ID NO: 67 - protein, 19 aa, Artificial Sequence
  CDR-H2 of G4H
RIRSKYNNYATYYADSVKG

SEQ ID NO: 68 - protein, 14 aa, Artificial Sequence
  CDR-H3 of G4H
HGNFGNSYLSYFAY

SEQ ID NO: 69 - protein, 125 aa, Artificial Sequence
  VH of G4H
EVQLVESGGGLVQPGGSLKLSCAASGFTFNRYAMNWVRQAPGKGLEWVARIRSKYNNYATYYADSVKGRFTISRDDSKNTAYLQMNNLKTEDTAVYYCVRHGNFGNSYLSYFAYWGQGTLVTVSS

SEQ ID NO: 70 - DNA, 375 bp, Artificial Sequence
  VH of G4H
gaggtgcagctggtcgagtctggaggaggattggtgcagcctggagggtcattgaaactctcatgtgcagcctctggattcaccttcaatcgctacgccatgaactgggtccgccaggctccaggaaagggtttggaatgggttgctcgcataagaagtaaatataataattatgcaacatattatgccgattcagtgaaagggaggttcaccatctccagagatgattcaaaaaacactgcctatctacaaatgaacaacttgaaaactgaggacactgccgtgtactactgtgtgagacatgggaacttcggtaatagctacttatcctacttcgcttactggggccaagggactctggtcaccgtctcctca

SEQ ID NO: 71 - protein, 109 aa, Artificial Sequence; identical to SEQ ID NO: 17
  VL of G4H

SEQ ID NO: 72 - DNA, 327 bp, Artificial Sequence; identical to SEQ ID NO: 18
  VL of G4H

SEQ ID NO: 73 - protein, 125 aa, Artificial Sequence
  VH-P of G4H
EVQLLESGGGLVQPGGSLKLSCAASGFTFNRYAMNWVRQAPGKGLEWVARIRSKYNNYATYYADSVKGRFTISRDDSKNTAYLQMNNLKTEDTAVYYCVRHGNFGNSYLSYFAYWGQGTLVTVSS

SEQ ID NO: 74 - DNA, 375 bp, Artificial Sequence
  VH-P of G4H
gaggtgcagctgctcgagtctggaggaggattggtgcagcctggagggtcattgaaactctcatgtgcagcctctggattcaccttcaatcgctacgccatgaactgggtccgccaggctccaggaaagggtttggaatgggttgctcgcataagaagtaaatataataattatgcaacatattatgccgattcagtgaaagggaggttcaccatctccagagatgattcaaaaaacactgcctatctacaaatgaacaacttgaaaactgaggacactgccgtgtactactgtgtgagacatgggaacttcggtaatagctacttatcctacttcgcttactggggccaagggactctggtcaccgtctcctca

SEQ ID NO: 75 - protein, 109 aa, Artificial Sequence; identical to SEQ ID NO: 21
  VL-P of G4H

SEQ ID NO: 76 - DNA, 327 bp, Artificial Sequence; identical to SEQ ID NO: 22
  VL-P of G4H

SEQ ID NO: 77 - protein, 249 aa, Artificial Sequence
  VH-VL of G4H
EVQLVESGGGLVQPGGSLKLSCAASGFTFNRYAMNWVRQAPGKGLEWVARIRSKYNNYATYYADSVKGRFTISRDDSKNTAYLQMNNLKTEDTAVYYCVRHGNFGNSYLSYFAYWGQGTLVTVSSGGGGSGGGGSGGGGSQTVVTQEPSLTVSPGGTVTLTCGSSTGAVTSGYYPNWVQQKPGQAPRGLIGGTKFLAPGTPARFSGSLLGGKAALTLSGVQPEDEAEYYCALWYSNRWVFGGGTKLTVL

SEQ ID NO: 78 - DNA, 747 bp, Artificial Sequence
  VH-VL of G4H
gaggtgcagctggtcgagtctggaggaggattggtgcagcctggagggtcattgaaactctcatgtgcagcctctggattcaccttcaatcgctacgccatgaactgggtccgccaggctccaggaaagggtttggaatgggttgctcgcataagaagtaaatataataattatgcaacatattatgccgattcagtgaaagggaggttcaccatctccagagatgattcaaaaaacactgcctatctacaaatgaacaacttgaaaactgaggacactgccgtgtactactgtgtgagacatgggaacttcggtaatagctacttatcctacttcgcttactggggccaagggactctggtcaccgtctcctcaggtggtggtggttctggcggcggcggctccggtggtggtggttctcagactgttgtgactcaggaaccttcactcaccgtatcacctggtggaacagtcacactcacttgtggctcctcgactggggctgttacatctggctactacccaaactgggtccaacaaaaaccaggtcaggcaccccgtggtctaataggtgggactaagttcctcgcccccggtactcctgccagattctcaggctccctgcttggaggcaaggctgccctcaccctctcaggggtacagccagaggatgaggcagaatattactgtgctctatggtacagcaaccgctgggtgttcggtggaggaaccaaactgactgtccta

SEQ ID NO: 79 - protein, 249 aa, Artificial Sequence
  VH-VL-P of G4H
EVQLLESGGGLVQPGGSLKLSCAASGFTFNRYAMNWVRQAPGKGLEWVARIRSKYNNYATYYADSVKGRFTISRDDSKNTAYLQMNNLKTEDTAVYYCVRHGNFGNSYLSYFAYWGQGTLVTVSSGGGGSGGGGSGGGGSELVVTQEPSLTVSPGGTVTLTCGSSTGAVTSGYYPNWVQQKPGQAPRGLIGGTKFLAPGTPARFSGSLLGGKAALTLSGVQPEDEAEYYCALWYSNRWVFGGGTKLTVL

SEQ ID NO: 80 - DNA, 747 bp, Artificial Sequence
  VH-VL-P of G4H
gaggtgcagctgctcgagtctggaggaggattggtgcagcctggagggtcattgaaactctcatgtgcagcctctggattcaccttcaatcgctacgccatgaactgggtccgccaggctccaggaaagggtttggaatgggttgctcgcataagaagtaaatataataattatgcaacatattatgccgattcagtgaaagggaggttcaccatctccagagatgattcaaaaaacactgcctatctacaaatgaacaacttgaaaactgaggacactgccgtgtactactgtgtgagacatgggaacttcggtaatagctacttatcctacttcgcttactggggccaagggactctggtcaccgtctcctcaggtggtggtggttctggcggcggcggctccggtggtggtggttctgagctcgttgtgactcaggaaccttcactcaccgtatcacctggtggaacagtcacactcacttgtggctcctcgactggggctgttacatctggctactacccaaactgggtccaacaaaaaccaggtcaggcaccccgtggtctaataggtgggactaagttcctcgcccccggtactcctgccagattctcaggctccctgcttggaggcaaggctgccctcaccctctcaggggtacagccagaggatgaggcagaatattactgtgctctatggtacagcaaccgctgggtgttcggtggaggaaccaaactgactgtccta

SEQ ID NO: 81 - protein, 14 aa, Artificial Sequence
  CDR-L1 of A2J
RSSTGAVTSGYYPN

SEQ ID NO: 82 - protein, 7 aa, Artificial Sequence
  CDR-L2 of A2J
ATDMRPS

SEQ ID NO: 83 - protein, 9 aa, Artificial Sequence
  CDR-L3 of A2J
ALWYSNRWV

SEQ ID NO: 84 - protein, 5 aa, Artificial Sequence
  CDR-H1 of A2J
VYAMN

SEQ ID NO: 85 - protein, 19 aa, Artificial Sequence
  CDR-H2 of A2J
RIRSKYNNYATYYADSVKK

SEQ ID NO: 86 - protein, 14 aa, Artificial Sequence
  CDR-H3 of A2J
HGNFGNSYLSWWAY

SEQ ID NO: 87 - protein, 125 aa, Artificial Sequence
  VH of A2J
EVQLVESGGGLVQPGGSLKLSCAASGFTFNVYAMNWVRQAPGKGLEWVARIRSKYNNYATYYADSVKKRFTISRDDSKNTAYLQMNNLKTEDTAVYYCVRHGNFGNSYLSWWAYWGQGTLVTVSS

SEQ ID NO: 88 - DNA, 375 bp, Artificial Sequence
  VH of A2J
gaggtgcagctggtcgagtctggaggaggattggtgcagcctggagggtcattgaaactctcatgtgcagcctctggattcaccttcaatgtctacgccatgaactgggtccgccaggctccaggaaagggtttggaatgggttgctcgcataagaagtaaatataataattatgcaacatattatgccgattcagtgaaaaagaggttcaccatctccagagatgattcaaaaaacactgcctatctacaaatgaacaacttgaaaactgaggacactgccgtgtactactgtgtgagacatgggaacttcggtaatagctacttatcctggtgggcttactggggccaagggactctggtcaccgtctcctca

SEQ ID NO: 89 - protein, 109 aa, Artificial Sequence
  VL of A2J
QTVVTQEPSLTVSPGGTVTLTCRSSTGAVTSGYYPNWVQQKPGQAPRGLIGATDMRPSGTPARFSGSLLGGKAALTLSGVQPEDEAEYYCALWYSNRWVFGGGTKLTVL

SEQ ID NO: 90 - DNA, 327 bp, Artificial Sequence
  VL of A2J
cagactgttgtgactcaggaaccttcactcaccgtatcacctggtggaacagtcacactcacttgtcgctcctcgactggggctgttacatctggctactacccaaactgggtccaacaaaaaccaggtcaggcaccccgtggtctaataggtgccactgacatgaggccctctggtactcctgccagattctcaggctccctgcttggaggcaaggctgccctcaccctctcaggggtacagccagaggatgaggcagaatattactgtgctctatggtacagcaaccgctgggtgttcggtggaggaaccaaactgactgtccta

SEQ ID NO: 91 - protein, 125 aa, Artificial Sequence
  VH-P of A2J
EVQLLESGGGLVQPGGSLKLSCAASGFTFNVYAMNWVRQAPGKGLEWVARIRSKYNNYATYYADSVKKRFTISRDDSKNTAYLQMNNLKTEDTAVYYCVRHGNFGNSYLSWWAYWGQGTLVTVSS

SEQ ID NO: 92 - DNA, 375 bp, Artificial Sequence
  VH-P of A2J
gaggtgcagctgctcgagtctggaggaggattggtgcagcctggagggtcattgaaactctcatgtgcagcctctggattcaccttcaatgtctacgccatgaactgggtccgccaggctccaggaaagggtttggaatgggttgctcgcataagaagtaaatataataattatgcaacatattatgccgattcagtgaaaaagaggttcaccatctccagagatgattcaaaaaacactgcctatctacaaatgaacaacttgaaaactgaggacactgccgtgtactactgtgtgagacatgggaacttcggtaatagctacttatcctggtgggcttactggggccaagggactctggtcaccgtctcctca

SEQ ID NO: 93 - protein, 109 aa, Artificial Sequence
  Artificial Sequence
ELVVTQEPSLTVSPGGTVTLTCRSSTGAVTSGYYPNWVQQKPGQAPRGLIGATDMRPSGTPARFSGSLLGGKAALTLSGVQPEDEAEYYCALWYSNRWVFGGGTKLTVL

SEQ ID NO: 94 - DNA, 327 bp, Artificial Sequence
  VL-P of A2J
gagctcgttgtgactcaggaaccttcactcaccgtatcacctggtggaacagtcacactcacttgtcgctcctcgactggggctgttacatctggctactacccaaactgggtccaacaaaaaccaggtcaggcaccccgtggtctaataggtgccactgacatgaggccctctggtactcctgccagattctcaggctccctgcttggaggcaaggctgccctcaccctctcaggggtacagccagaggatgaggcagaatattactgtgctctatggtacagcaaccgctgggtgttcggtggaggaaccaaactgactgtccta

SEQ ID NO: 95 - protein, 249 aa, Artificial Sequence
  VH-VL of A2J
EVQLVESGGGLVQPGGSLKLSCAASGFTFNVYAMNWVRQAPGKGLEWVARIRSKYNNYATYYADSVKKRFTISRDDSKNTAYLQMNNLKTEDTAVYYCVRHGNFGNSYLSWWAYWGQGTLVTVSSGGGGSGGGGSGGGGSQTVVTQEPSLTVSPGGTVTLTCRSSTGAVTSGYYPNWVQQKPGQAPRGLIGATDMRPSGTPARFSGSLLGGKAALTLSGVQPEDEAEYYCALWYSNRWVFGGGTKLTVL

SEQ ID NO: 96 - DNA, 747 bp, Artificial Sequence
  VH-VL of A2J
gaggtgcagctggtcgagtctggaggaggattggtgcagcctggagggtcattgaaactctcatgtgcagcctctggattcaccttcaatgtctacgccatgaactgggtccgccaggctccaggaaagggtttggaatgggttgctcgcataagaagtaaatataataattatgcaacatattatgccgattcagtgaaaaagaggttcaccatctccagagatgattcaaaaaacactgcctatctacaaatgaacaacttgaaaactgaggacactgccgtgtactactgtgtgagacatgggaacttcggtaatagctacttatcctggtgggcttactggggccaagggactctggtcaccgtctcctcaggtggtggtggttctggcggcggcggctccggtggtggtggttctcagactgttgtgactcaggaaccttcactcaccgtatcacctggtggaacagtcacactcacttgtcgctcctcgactggggctgttacatctggctactacccaaactgggtccaacaaaaaccaggtcaggcaccccgtggtctaataggtgccactgacatgaggccctctggtactcctgccagattctcaggctccctgcttggaggcaaggctgccctcaccctctcaggggtacagccagaggatgaggcagaatattactgtgctctatggtacagcaaccgctgggtgttcggtggaggaaccaaactgactgtccta

SEQ ID NO: 97 - protein, 249 aa, Artificial Sequence
  VH-VL-P of A2J
EVQLLESGGGLVQPGGSLKLSCAASGFTFNVYAMNWVRQAPGKGLEWVARIRSKYNNYATYYADSVKKRFTISRDDSKNTAYLQMNNLKTEDTAVYYCVRHGNFGNSYLSWWAYWGQGTLVTVSSGGGGSGGGGSGGGGSELVVTQEPSLTVSPGGTVTLTCRSSTGAVTSGYYPNWVQQKPGQAPRGLIGATDMRPSGTPARFSGSLLGGKAALTLSGVQPEDEAEYYCALWYSNRWVFGGGTKLTVL

SEQ ID NO: 98 - DNA, 747 bp, Artificial Sequence
  VH-VL-P of A2J
gaggtgcagctgctcgagtctggaggaggattggtgcagcctggagggtcattgaaactctcatgtgcagcctctggattcaccttcaatgtctacgccatgaactgggtccgccaggctccaggaaagggtttggaatgggttgctcgcataagaagtaaatataataattatgcaacatattatgccgattcagtgaaaaagaggttcaccatctccagagatgattcaaaaaacactgcctatctacaaatgaacaacttgaaaactgaggacactgccgtgtactactgtgtgagacatgggaacttcggtaatagctacttatcctggtgggcttactggggccaagggactctggtcaccgtctcctcaggtggtggtggttctggcggcggcggctccggtggtggtggttctgagctcgttgtgactcaggaaccttcactcaccgtatcacctggtggaacagtcacactcacttgtcgctcctcgactggggctgttacatctggctactacccaaactgggtccaacaaaaaccaggtcaggcaccccgtggtctaataggtgccactgacatgaggccctctggtactcctgccagattctcaggctccctgcttggaggcaaggctgccctcaccctctcaggggtacagccagaggatgaggcagaatattactgtgctctatggtacagcaaccgctgggtgttcggtggaggaaccaaactgactgtccta

SEQ ID NO: 99 - protein, 14 aa, Artificial Sequence
  CDR-L1 of E1L
GSSTGAVTSGYYPN

SEQ ID NO: 100 - protein, 7 aa, Artificial Sequence
  CDR-L2 of E1L
GTKFLAP

SEQ ID NO: 101 - protein, 9 aa, Artificial Sequence
  CDR-L3 of E1L
ALWYSNRWV

SEQ ID NO: 102 - protein, 5 aa, Artificial Sequence
  CDR-H1 of E1L
KYAMN

SEQ ID NO: 103 - protein, 19 aa, Artificial Sequence
  CDR-H2 of E1L
RIRSKYNNYATYYADSVKS

SEQ ID NO: 104 - protein, 14 aa, Artificial Sequence
  CDR-H3 of E1L
HGNFGNSYTSYYAY

SEQ ID NO: 105 - protein, 125 aa, Artificial Sequence
  VH of E1L
EVQLVESGGGLVQPGGSLKLSCAASGFTFNKYAMNWVRQAPGKGLEWVARIRSKYNNYATYYADSVKSRFTISRDDSKNTAYLQMNNLKTEDTAVYYCVRHGNFGNSYTSYYAYWGQGTLVTVSS

SEQ ID NO: 106 - DNA, 375 bp, Artificial Sequence
  VH of E1L
gaggtgcagctggtcgagtctggaggaggattggtgcagcctggagggtcattgaaactctcatgtgcagcctctggattcaccttcaataagtacgccatgaactgggtccgccaggctccaggaaagggtttggaatgggttgctcgcataagaagtaaatataataattatgcaacatattatgccgattcagtgaaatcgaggttcaccatctccagagatgattcaaaaaacactgcctatctacaaatgaacaacttgaaaactgaggacactgccgtgtactactgtgtgagacatgggaacttcggtaatagctacacatcctactacgcttactggggccaagggactctggtcaccgtctcctca

SEQ ID NO: 107 - protein, 109 aa, Artificial Sequence; identical to SEQ ID NO: 17
  VL of E1L

SEQ ID NO: 108 - DNA, 327 bp, Artificial Sequence; identical to SEQ ID NO: 18
  VL of E1L

SEQ ID NO: 109 - protein, 125 aa, Artificial Sequence
  VH-P of E1L
EVQLLESGGGLVQPGGSLKLSCAASGFTFNKYAMNWVRQAPGKGLEWVARIRSKYNNYATYYADSVKSRFTISRDDSKNTAYLQMNNLKTEDTAVYYCVRHGNFGNSYTSYYAYWGQGTLVTVSS

SEQ ID NO: 110 - DNA, 375 bp, Artificial Sequence
  VH-P of E1L
gaggtgcagctgctcgagtctggaggaggattggtgcagcctggagggtcattgaaactctcatgtgcagcctctggattcaccttcaataagtacgccatgaactgggtccgccaggctccaggaaagggtttggaatgggttgctcgcataagaagtaaatataataattatgcaacatattatgccgattcagtgaaatcgaggttcaccatctccagagatgattcaaaaaacactgcctatctacaaatgaacaacttgaaaactgaggacactgccgtgtactactgtgtgagacatgggaacttcggtaatagctacacatcctactacgcttactggggccaagggactctggtcaccgtctcctca

SEQ ID NO: 111 - protein, 109 aa, Artificial Sequence; identical to SEQ ID NO: 21
  VL-P of E1L

SEQ ID NO: 112 - DNA, 327 bp, Artificial Sequence; identical to SEQ ID NO: 22
  VL-P of E1L

SEQ ID NO: 113 - protein, 249 aa, Artificial Sequence
  VH-VL of E1L
EVQLVESGGGLVQPGGSLKLSCAASGFTFNKYAMNWVRQAPGKGLEWVARIRSKYNNYATYYADSVKSRFTISRDDSKNTAYLQMNNLKTEDTAVYYCVRHGNFGNSYTSYYAYWGQGTLVTVSSGGGGSGGGGSGGGGSQTVVTQEPSLTVSPGGTVTLTCGSSTGAVTSGYYPNWVQQKPGQAPRGLIGGTKFLAPGTPARFSGSLLGGKAALTLSGVQPEDEAEYYCALWYSNRWVFGGGTKLTVL

SEQ ID NO: 114 - DNA, 747 bp, Artificial Sequence
  VH-VL of E1L
gaggtgcagctggtcgagtctggaggaggattggtgcagcctggagggtcattgaaactctcatgtgcagcctctggattcaccttcaataagtacgccatgaactgggtccgccaggctccaggaaagggtttggaatgggttgctcgcataagaagtaaatataataattatgcaacatattatgccgattcagtgaaatcgaggttcaccatctccagagatgattcaaaaaacactgcctatctacaaatgaacaacttgaaaactgaggacactgccgtgtactactgtgtgagacatgggaacttcggtaatagctacacatcctactacgcttactggggccaagggactctggtcaccgtctcctcaggtggtggtggttctggcggcggcggctccggtggtggtggttctcagactgttgtgactcaggaaccttcactcaccgtatcacctggtggaacagtcacactcacttgtggctcctcgactggggctgttacatctggctactacccaaactgggtccaacaaaaaccaggtcaggcaccccgtggtctaataggtgggactaagttcctcgcccccggtactcctgccagattctcaggctccctgcttggaggcaaggctgccctcaccctctcaggggtacagccagaggatgaggcagaatattactgtgctctatggtacagcaaccgctgggtgttcggtggaggaaccaaactgactgtccta

SEQ ID NO: 115 - protein, 249 aa, Artificial Sequence
  VH-VL-P of E1L
EVQLLESGGGLVQPGGSLKLSCAASGFTFNKYAMNWVRQAPGKGLEWVARIRSKYNNYATYYADSVKSRFTISRDDSKNTAYLQMNNLKTEDTAVYYCVRHGNFGNSYTSYYAYWGQGTLVTVSSGGGGSGGGGSGGGGSELVVTQEPSLTVSPGGTVTLTCGSSTGAVTSGYYPNWVQQKPGQAPRGLIGGTKFLAPGTPARFSGSLLGGKAALTLSGVQPEDEAEYYCALWYSNRWVFGGGTKLTVL

SEQ ID NO: 116 - DNA, 747 bp, Artificial Sequence
  VH-VL-P of E1L
gaggtgcagctgctcgagtctggaggaggattggtgcagcctggagggtcattgaaactctcatgtgcagcctctggattcaccttcaataagtacgccatgaactgggtccgccaggctccaggaaagggtttggaatgggttgctcgcataagaagtaaatataataattatgcaacatattatgccgattcagtgaaatcgaggttcaccatctccagagatgattcaaaaaacactgcctatctacaaatgaacaacttgaaaactgaggacactgccgtgtactactgtgtgagacatgggaacttcggtaatagctacacatcctactacgcttactggggccaagggactctggtcaccgtctcctcaggtggtggtggttctggcggcggcggctccggtggtggtggttctgagctcgttgtgactcaggaaccttcactcaccgtatcacctggtggaacagtcacactcacttgtggctcctcgactggggctgttacatctggctactacccaaactgggtccaacaaaaaccaggtcaggcaccccgtggtctaataggtgggactaagttcctcgcccccggtactcctgccagattctcaggctccctgcttggaggcaaggctgccctcaccctctcaggggtacagccagaggatgaggcagaatattactgtgctctatggtacagcaaccgctgggtgttcggtggaggaaccaaactgactgtccta

SEQ ID NO: 117 - protein, 14 aa, Artificial Sequence
  CDR-L1 of E2M
RSSTGAVTSGYYPN

SEQ ID NO: 118 - protein, 7 aa, Artificial Sequence
  CDR-L2 of E2M
ATDMRPS

SEQ ID NO: 119 - protein, 9 aa, Artificial Sequence
  CDR-L3 of E2M
ALWYSNRWV

SEQ ID NO: 120 - protein, 5 aa, Artificial Sequence
  CDR-H1 of E2M
GYAMN

SEQ ID NO: 121 - protein, 19 aa, Artificial Sequence
  CDR-H2 of E2M
RIRSKYNNYATYYADSVKE

SEQ ID NO: 122 - protein, 14 aa, Artificial Sequence
  CDR-H3 of E2M
HRNFGNSYLSWFAY

SEQ ID NO: 123 - protein, 125 aa, Artificial Sequence
  VH of E2M
EVQLVESGGGLVQPGGSLKLSCAASGFTFNGYAMNWVRQAPGKGLEWVARIRSKYNNYATYYADSVKERFTISRDDSKNTAYLQMNNLKTEDTAVYYCVRHRNFGNSYLSWFAYWGQGTLVTVSS

SEQ ID NO: 124 - DNA, 375 bp, Artificial Sequence
  VH of E2M
gaggtgcagctggtcgagtctggaggaggattggtgcagcctggagggtcattgaaactctcatgtgcagcctctggattcaccttcaatggctacgccatgaactgggtccgccaggctccaggaaagggtttggaatgggttgctcgcataagaagtaaatataataattatgcaacatattatgccgattcagtgaaagagaggttcaccatctccagagatgattcaaaaaacactgcctatctacaaatgaacaacttgaaaactgaggacactgccgtgtactactgtgtgagacataggaacttcggtaatagctacttatcctggttcgcttactggggccaagggactctggtcaccgtctcctca

SEQ ID NO: 125 - protein, 109 aa, Artificial Sequence; identical to SEQ ID NO: 89
  VL of E2M

SEQ ID NO: 126 - DNA, 327 bp, Artificial Sequence; identical to SEQ ID NO: 90
  VL of E2M

SEQ ID NO: 127 - protein, 125 aa, Artificial Sequence
  VH-P of E2M
EVQLLESGGGLVQPGGSLKLSCAASGFTFNGYAMNWVRQAPGKGLEWVARIRSKYNNYATYYADSVKERFTISRDDSKNTAYLQMNNLKTEDTAVYYCVRHRNFGNSYLSWFAYWGQGTLVTVSS

SEQ ID NO: 128 - DNA, 375 bp, Artificial Sequence
  VH-P of E2M
gaggtgcagctgctcgagtctggaggaggattggtgcagcctggagggtcattgaaactctcatgtgcagcctctggattcaccttcaatggctacgccatgaactgggtccgccaggctccaggaaagggtttggaatgggttgctcgcataagaagtaaatataataattatgcaacatattatgccgattcagtgaaagagaggttcaccatctccagagatgattcaaaaaacactgcctatctacaaatgaacaacttgaaaactgaggacactgccgtgtactactgtgtgagacataggaacttcggtaatagctacttatcctggttcgcttactggggccaagggactctggtcaccgtctcctca

SEQ ID NO: 129 - protein, 109 aa, Artificial Sequence; identical to SEQ ID NO: 93
  VL-P of E2M

SEQ ID NO: 130 - DNA, 327 bp, Artificial Sequence; identical to SEQ ID NO: 94
  VL-P of E2M

SEQ ID NO: 131 - protein, 249 aa, Artificial Sequence
  VH-VL of E2M
EVQLVESGGGLVQPGGSLKLSCAASGFTFNGYAMNWVRQAPGKGLEWVARIRSKYNNYATYYADSVKERFTISRDDSKNTAYLQMNNLKTEDTAVYYCVRHRNFGNSYLSWFAYWGQGTLVTVSSGGGGSGGGGSGGGGSQTVVTQEPSLTVSPGGTVTLTCRSSTGAVTSGYYPNWVQQKPGQAPRGLIGATDMRPSGTPARFSGSLLGGKAALTLSGVQPEDEAEYYCALWYSNRWVFGGGTKLTVL

SEQ ID NO: 132 - DNA, 747 bp, Artificial Sequence
  VH-VL of E2M
gaggtgcagctggtcgagtctggaggaggattggtgcagcctggagggtcattgaaactctcatgtgcagcctctggattcaccttcaatggctacgccatgaactgggtccgccaggctccaggaaagggtttggaatgggttgctcgcataagaagtaaatataataattatgcaacatattatgccgattcagtgaaagagaggttcaccatctccagagatgattcaaaaaacactgcctatctacaaatgaacaacttgaaaactgaggacactgccgtgtactactgtgtgagacataggaacttcggtaatagctacttatcctggttcgcttactggggccaagggactctggtcaccgtctcctcaggtggtggtggttctggcggcggcggctccggtggtggtggttctcagactgttgtgactcaggaaccttcactcaccgtatcacctggtggaacagtcacactcacttgtcgctcctcgactggggctgttacatctggctactacccaaactgggtccaacaaaaaccaggtcaggcaccccgtggtctaataggtgccactgacatgaggccctctggtactcctgccagattctcaggctccctgcttggaggcaaggctgccctcaccctctcaggggtacagccagaggatgaggcagaatattactgtgctctatggtacagcaaccgctgggtgttcggtggaggaaccaaactgactgtccta

SEQ ID NO: 133 - protein, 249 aa, Artificial Sequence
  VH-VL-P of E2M
EVQLLESGGGLVQPGGSLKLSCAASGFTFNGYAMNWVRQAPGKGLEWVARIRSKYNNYATYYADSVKERFTISRDDSKNTAYLQMNNLKTEDTAVYYCVRHRNFGNSYLSWFAYWGQGTLVTVSSGGGGSGGGGSGGGGSELVVTQEPSLTVSPGGTVTLTCRSSTGAVTSGYYPNWVQQKPGQAPRGLIGATDMRPSGTPARFSGSLLGGKAALTLSGVQPEDEAEYYCALWYSNRWVFGGGTKLTVL

SEQ ID NO: 134 - DNA, 747 bp, Artificial Sequence
  VH-VL-P of E2M
gaggtgcagctgctcgagtctggaggaggattggtgcagcctggagggtcattgaaactctcatgtgcagcctctggattcaccttcaatggctacgccatgaactgggtccgccaggctccaggaaagggtttggaatgggttgctcgcataagaagtaaatataataattatgcaacatattatgccgattcagtgaaagagaggttcaccatctccagagatgattcaaaaaacactgcctatctacaaatgaacaacttgaaaactgaggacactgccgtgtactactgtgtgagacataggaacttcggtaatagctacttatcctggttcgcttactggggccaagggactctggtcaccgtctcctcaggtggtggtggttctggcggcggcggctccggtggtggtggttctgagctcgttgtgactcaggaaccttcactcaccgtatcacctggtggaacagtcacactcacttgtcgctcctcgactggggctgttacatctggctactacccaaactgggtccaacaaaaaccaggtcaggcaccccgtggtctaataggtgccactgacatgaggccctctggtactcctgccagattctcaggctccctgcttggaggcaaggctgccctcaccctctcaggggtacagccagaggatgaggcagaatattactgtgctctatggtacagcaaccgctgggtgttcggtggaggaaccaaactgactgtccta

SEQ ID NO: 135 - protein, 14 aa, Artificial Sequence
  CDR-L1 of F7O
GSSTGAVTSGYYPN

SEQ ID NO: 136 - protein, 7 aa, Artificial Sequence
  CDR-L2 of F7O
GTKFLAP

SEQ ID NO: 137 - protein, 9 aa, Artificial Sequence
  CDR-L3 of F7O
ALWYSNRWV

SEQ ID NO: 138 - protein, 5 aa, Artificial Sequence
  CDR-H1 of F7O
VYAMN

SEQ ID NO: 139 - protein, 19 aa, Artificial Sequence
  CDR-H2 of F7O
RIRSKYNNYATYYADSVKK

SEQ ID NO: 140 - protein, 14 aa, Artificial Sequence
  CDR-H3 of F7O
HGNFGNSYISWWAY

SEQ ID NO: 141 - protein, 125 aa, Artificial Sequence
  VH of F7O
EVQLVESGGGLVQPGGSLKLSCAASGFTFNVYAMNWVRQAPGKGLEWVARIRSKYNNYATYYADSVKKRFTISRDDSKNTAYLQMNNLKTEDTAVYYCVRHGNFGNSYISWWAYWGQGTLVTVSS

SEQ ID NO: 142 - DNA, 375 bp, Artificial Sequence
  VH of F7O
gaggtgcagctggtcgagtctggaggaggattggtgcagcctggagggtcattgaaactctcatgtgcagcctctggattcaccttcaatgtgtacgccatgaactgggtccgccaggctccaggaaagggtttggaatgggttgctcgcataagaagtaaatataataattatgcaacatattatgccgattcagtgaaaaagaggttcaccatctccagagatgattcaaaaaacactgcctatctacaaatgaacaacttgaaaactgaggacactgccgtgtactactgtgtgagacatgggaacttcggtaatagctacatatcctggtgggcttactggggccaagggactctggtcaccgtctcctca

SEQ ID NO: 143 - protein, 109 aa, Artificial Sequence; identical to SEQ ID NO: 17
  VL of F7O

SEQ ID NO: 144 - DNA, 327 bp, Artificial Sequence; identical to SEQ ID NO: 18
  VL of F7O

SEQ ID NO: 145 - protein, 125 aa, Artificial Sequence
  VH-P of F7O
EVQLLESGGGLVQPGGSLKLSCAASGFTFNVYAMNWVRQAPGKGLEWVARIRSKYNNYATYYADSVKKRFTISRDDSKNTAYLQMNNLKTEDTAVYYCVRHGNFGNSYISWWAYWGQGTLVTVSS

SEQ ID NO: 146 - DNA, 375 bp, Artificial Sequence
  VH-P of F7O
gaggtgcagctgctcgagtctggaggaggattggtgcagcctggagggtcattgaaactctcatgtgcagcctctggattcaccttcaatgtgtacgccatgaactgggtccgccaggctccaggaaagggtttggaatgggttgctcgcataagaagtaaatataataattatgcaacatattatgccgattcagtgaaaaagaggttcaccatctccagagatgattcaaaaaacactgcctatctacaaatgaacaacttgaaaactgaggacactgccgtgtactactgtgtgagacatgggaacttcggtaatagctacatatcctggtgggcttactggggccaagggactctggtcaccgtctcctca

SEQ ID NO: 147 - protein, 109 aa, Artificial Sequence; identical to SEQ ID NO: 21
  VL-P of F7O

SEQ ID NO: 148 - DNA, 327 bp, Artificial Sequence; identical to SEQ ID NO: 22
  VL-P of F7O

SEQ ID NO: 149 - protein, 249 aa, Artificial Sequence
  VH-VL of F7O
EVQLVESGGGLVQPGGSLKLSCAASGFTFNVYAMNWVRQAPGKGLEWVARIRSKYNNYATYYADSVKKRFTISRDDSKNTAYLQMNNLKTEDTAVYYCVRHGNFGNSYISWWAYWGQGTLVTVSSGGGGSGGGGSGGGGSQTVVTQEPSLTVSPGGTVTLTCGSSTGAVTSGYYPNWVQQKPGQAPRGLIGGTKFLAPGTPARFSGSLLGGKAALTLSGVQPEDEAEYYCALWYSNRWVFGGGTKLTVL

SEQ ID NO: 150 - DNA, 747 bp, Artificial Sequence
  VH-VL of F7O
gaggtgcagctggtcgagtctggaggaggattggtgcagcctggagggtcattgaaactctcatgtgcagcctctggattcaccttcaatgtgtacgccatgaactgggtccgccaggctccaggaaagggtttggaatgggttgctcgcataagaagtaaatataataattatgcaacatattatgccgattcagtgaaaaagaggttcaccatctccagagatgattcaaaaaacactgcctatctacaaatgaacaacttgaaaactgaggacactgccgtgtactactgtgtgagacatgggaacttcggtaatagctacatatcctggtgggcttactggggccaagggactctggtcaccgtctcctcaggtggtggtggttctggcggcggcggctccggtggtggtggttctcagactgttgtgactcaggaaccttcactcaccgtatcacctggtggaacagtcacactcacttgtggctcctcgactggggctgttacatctggctactacccaaactgggtccaacaaaaaccaggtcaggcaccccgtggtctaataggtgggactaagttcctcgcccccggtactcctgccagattctcaggctccctgcttggaggcaaggctgccctcaccctctcaggggtacagccagaggatgaggcagaatattactgtgctctatggtacagcaaccgctgggtgttcggtggaggaaccaaactgactgtccta

SEQ ID NO: 151 - protein, 249 aa, Artificial Sequence
  VH-VL-P of F7O
EVQLLESGGGLVQPGGSLKLSCAASGFTFNVYAMNWVRQAPGKGLEWVARIRSKYNNYATYYADSVKKRFTISRDDSKNTAYLQMNNLKTEDTAVYYCVRHGNFGNSYISWWAYWGQGTLVTVSSGGGGSGGGGSGGGGSELVVTQEPSLTVSPGGTVTLTCGSSTGAVTSGYYPNWVQQKPGQAPRGLIGGTKFLAPGTPARFSGSLLGGKAALTLSGVQPEDEAEYYCALWYSNRWVFGGGTKLTVL

SEQ ID NO: 152 - DNA, 747 bp, Artificial Sequence
  VH-VL-P of F7O
gaggtgcagctgctcgagtctggaggaggattggtgcagcctggagggtcattgaaactctcatgtgcagcctctggattcaccttcaatgtgtacgccatgaactgggtccgccaggctccaggaaagggtttggaatgggttgctcgcataagaagtaaatataataattatgcaacatattatgccgattcagtgaaaaagaggttcaccatctccagagatgattcaaaaaacactgcctatctacaaatgaacaacttgaaaactgaggacactgccgtgtactactgtgtgagacatgggaacttcggtaatagctacatatcctggtgggcttactggggccaagggactctggtcaccgtctcctcaggtggtggtggttctggcggcggcggctccggtggtggtggttctgagctcgttgtgactcaggaaccttcactcaccgtatcacctggtggaacagtcacactcacttgtggctcctcgactggggctgttacatctggctactacccaaactgggtccaacaaaaaccaggtcaggcaccccgtggtctaataggtgggactaagttcctcgcccccggtactcctgccagattctcaggctccctgcttggaggcaaggctgccctcaccctctcaggggtacagccagaggatgaggcagaatattactgtgctctatggtacagcaaccgctgggtgttcggtggaggaaccaaactgactgtccta

SEQ ID NO: 153 - protein, 14 aa, Artificial Sequence
  CDR-L1 of F12Q
GSSTGAVTSGNYPN

SEQ ID NO: 154 - protein, 7 aa, Artificial Sequence
  CDR-L2 of F12Q
GTKFLAP

SEQ ID NO: 155 - protein, 9 aa, Artificial Sequence
  CDR-L3 of F12Q
VLWYSNRWV

SEQ ID NO: 156 - protein, 5 aa, Artificial Sequence
  CDR-H1 of F12Q
SYAMN

SEQ ID NO: 157 - protein, 19 aa, Artificial Sequence
  CDR-H2 of F12Q
RIRSKYNNYATYYADSVKG

SEQ ID NO: 158 - protein, 14 aa, Artificial Sequence
  CDR-H3 of F12Q
HGNFGNSYVSWWAY

SEQ ID NO: 159 - protein, 125 aa, Artificial Sequence
  VH of F12Q
EVQLVESGGGLVQPGGSLKLSCAASGFTFNSYAMNWVRQAPGKGLEWVARIRSKYNNYATYYADSVKGRFTISRDDSKNTAYLQMNNLKTEDTAVYYCVRHGNFGNSYVSWWAYWGQGTLVTVSS

SEQ ID NO: 160 - DNA, 375 bp, Artificial Sequence
  VH of F12Q
gaggtgcagctggtcgagtctggaggaggattggtgcagcctggagggtcattgaaactctcatgtgcagcctctggattcaccttcaatagctacgccatgaactgggtccgccaggctccaggaaagggtttggaatgggttgctcgcataagaagtaaatataataattatgcaacatattatgccgattcagtgaaaggcaggttcaccatctccagagatgattcaaaaaacactgcctatctacaaatgaacaacttgaaaactgaggacactgccgtgtactactgtgtgagacatgggaacttcggtaatagctacgtttcctggtgggcttactggggccaagggactctggtcaccgtctcctca

SEQ ID NO: 161 - protein, 109 aa, Artificial Sequence
  VL of F12Q
QTVVTQEPSLTVSPGGTVTLTCGSSTGAVTSGNYPNWVQQKPGQAPRGLIGGTKFLAPGTPARFSGSLLGGKAALTLSGVQPEDEAEYYCVLWYSNRWVFGGGTKLTVL

SEQ ID NO: 162 - DNA, 327 bp, Artificial Sequence
  VL of F12Q
cagactgttgtgactcaggaaccttcactcaccgtatcacctggtggaacagtcacactcacttgtggctcctcgactggggctgttacatctggcaactacccaaactgggtccaacaaaaaccaggtcaggcaccccgtggtctaataggtgggactaagttcctcgcccccggtactcctgccagattctcaggctccctgcttggaggcaaggctgccctcaccctctcaggggtacagccagaggatgaggcagaatattactgtgttctatggtacagcaaccgctgggtgttcggtggaggaaccaaactgactgtccta

SEQ ID NO: 163 - protein, 125 aa, Artificial Sequence
  VH-P of F12Q
EVQLLESGGGLVQPGGSLKLSCAASGFTFNSYAMNWVRQAPGKGLEWVARIRSKYNNYATYYADSVKGRFTISRDDSKNTAYLQMNNLKTEDTAVYYCVRHGNFGNSYVSWWAYWGQGTLVTVSS

SEQ ID NO: 164 - DNA, 375 bp, Artificial Sequence
  VH-P of F12Q
gaggtgcagctgctcgagtctggaggaggattggtgcagcctggagggtcattgaaactctcatgtgcagcctctggattcaccttcaatagctacgccatgaactgggtccgccaggctccaggaaagggtttggaatgggttgctcgcataagaagtaaatataataattatgcaacatattatgccgattcagtgaaaggcaggttcaccatctccagagatgattcaaaaaacactgcctatctacaaatgaacaacttgaaaactgaggacactgccgtgtactactgtgtgagacatgggaacttcggtaatagctacgtttcctggtgggcttactggggccaagggactctggtcaccgtctcctca

SEQ ID NO: 165 - protein, 109 aa, Artificial Sequence
  VL-P of F12Q
ELVVTQEPSLTVSPGGTVTLTCGSSTGAVTSGNYPNWVQQKPGQAPRGLIGGTKFLAPGTPARFSGSLLGGKAALTLSGVQPEDEAEYYCVLWYSNRWVFGGGTKLTVL

SEQ ID NO: 166 - DNA, 327 bp, Artificial Sequence
  VL-P of F12Q
gagctcgttgtgactcaggaaccttcactcaccgtatcacctggtggaacagtcacactcacttgtggctcctcgactggggctgttacatctggcaactacccaaactgggtccaacaaaaaccaggtcaggcaccccgtggtctaataggtgggactaagttcctcgcccccggtactcctgccagattctcaggctccctgcttggaggcaaggctgccctcaccctctcaggggtacagccagaggatgaggcagaatattactgtgttctatggtacagcaaccgctgggtgttcggtggaggaaccaaactgactgtccta

SEQ ID NO: 167 - protein, 249 aa, Artificial Sequence
  VH-VL of F12Q
EVQLVESGGGLVQPGGSLKLSCAASGFTFNSYAMNWVRQAPGKGLEWVARIRSKYNNYATYYADSVKGRFTISRDDSKNTAYLQMNNLKTEDTAVYYCVRHGNFGNSYVSWWAYWGQGTLVTVSSGGGGSGGGGSGGGGSQTVVTQEPSLTVSPGGTVTLTCGSSTGAVTSGNYPNWVQQKPGQAPRGLIGGTKFLAPGTPARFSGSLLGGKAALTLSGVQPEDEAEYYCVLWYSNRWVFGGGTKLTVL

SEQ ID NO: 168 - DNA, 747 bp, Artificial Sequence
  VH-VL of F12Q
gaggtgcagctggtcgagtctggaggaggattggtgcagcctggagggtcattgaaactctcatgtgcagcctctggattcaccttcaatagctacgccatgaactgggtccgccaggctccaggaaagggtttggaatgggttgctcgcataagaagtaaatataataattatgcaacatattatgccgattcagtgaaaggcaggttcaccatctccagagatgattcaaaaaacactgcctatctacaaatgaacaacttgaaaactgaggacactgccgtgtactactgtgtgagacatgggaacttcggtaatagctacgtttcctggtgggcttactggggccaagggactctggtcaccgtctcctcaggtggtggtggttctggcggcggcggctccggtggtggtggttctcagactgttgtgactcaggaaccttcactcaccgtatcacctggtggaacagtcacactcacttgtggctcctcgactggggctgttacatctggcaactacccaaactgggtccaacaaaaaccaggtcaggcaccccgtggtctaataggtgggactaagttcctcgcccccggtactcctgccagattctcaggctccctgcttggaggcaaggctgccctcaccctctcaggggtacagccagaggatgaggcagaatattactgtgttctatggtacagcaaccgctgggtgttcggtggaggaaccaaactgactgtccta

SEQ ID NO: 169 - protein, 249 aa, Artificial Sequence
  VH-VL-P of F12Q
EVQLLESGGGLVQPGGSLKLSCAASGFTFNSYAMNWVRQAPGKGLEWVARIRSKYNNYATYYADSVKGRFTISRDDSKNTAYLQMNNLKTEDTAVYYCVRHGNFGNSYVSWWAYWGQGTLVTVSSGGGGSGGGGSGGGGSELVVTQEPSLTVSPGGTVTLTCGSSTGAVTSGNYPNWVQQKPGQAPRGLIGGTKFLAPGTPARFSGSLLGGKAALTLSGVQPEDEAEYYCVLWYSNRWVFGGGTKLTVL

SEQ ID NO: 170 - DNA, 747 bp, Artificial Sequence
  VH-VL-P of F12Q
gaggtgcagctgctcgagtctggaggaggattggtgcagcctggagggtcattgaaactctcatgtgcagcctctggattcaccttcaatagctacgccatgaactgggtccgccaggctccaggaaagggtttggaatgggttgctcgcataagaagtaaatataataattatgcaacatattatgccgattcagtgaaaggcaggttcaccatctccagagatgattcaaaaaacactgcctatctacaaatgaacaacttgaaaactgaggacactgccgtgtactactgtgtgagacatgggaacttcggtaatagctacgtttcctggtgggcttactggggccaagggactctggtcaccgtctcctcaggtggtggtggttctggcggcggcggctccggtggtggtggttctgagctcgttgtgactcaggaaccttcactcaccgtatcacctggtggaacagtcacactcacttgtggctcctcgactggggctgttacatctggcaactacccaaactgggtccaacaaaaaccaggtcaggcaccccgtggtctaataggtgggactaagttcctcgcccccggtactcctgccagattctcaggctccctgcttggaggcaaggctgccctcaccctctcaggggtacagccagaggatgaggcagaatattactgtgttctatggtacagcaaccgctgggtgttcggtggaggaaccaaactgactgtccta

SEQ ID NO: 171 - protein, 14 aa, Artificial Sequence
  CDR-L1 of I2C
GSSTGAVTSGNYPN

SEQ ID NO: 172 - protein, 7 aa, Artificial Sequence
  CDR-L2 of I2C
GTKFLAP

SEQ ID NO: 173 - protein, 9 aa, Artificial Sequence
  CDR-L3 of I2C
VLWYSNRWV

SEQ ID NO: 174 - protein, 5 aa, Artificial Sequence
  CDR-H1 of I2C
KYAMN

SEQ ID NO: 175 - protein, 19 aa, Artificial Sequence
  CDR-H2 of I2C
RIRSKYNNYATYYADSVKD

SEQ ID NO: 176 - protein, 14 aa, Artificial Sequence
  CDR-H3 of I2C
HGNFGNSYISYWAY

SEQ ID NO: 177 - protein, 125 aa, Artificial Sequence; identical to SEQ ID NO: 33
  VH of I2C

SEQ ID NO: 178 - DNA, 375 bp, Artificial Sequence; identical to SEQ ID NO: 34
  VH of I2C

SEQ ID NO: 179 - protein, 109 aa, Artificial Sequence; identical to SEQ ID NO: 161
  VL of I2C

SEQ ID NO: 180 - DNA, 327 bp, Artificial Sequence; identical to SEQ ID NO: 162
  VL of I2C

SEQ ID NO: 181 - protein, 125 aa, Artificial Sequence; identical to SEQ ID NO: 37
  VH-P of I2C

SEQ ID NO: 182 - DNA, 375 bp, Artificial Sequence; identical to SEQ ID NO: 38
  VH-P of I2C

SEQ ID NO: 183 - protein, 109 aa, Artificial Sequence; identical to SEQ ID NO: 165
  VL-P of I2C

SEQ ID NO: 184 - DNA, 327 bp, Artificial Sequence; identical to SEQ ID NO: 166
  VL-P of I2C

SEQ ID NO: 185 - protein, 249 aa, Artificial Sequence
  VH-VL of I2C
EVQLVESGGGLVQPGGSLKLSCAASGFTFNKYAMNWVRQAPGKGLEWVARIRSKYNNYATYYADSVKDRFTISRDDSKNTAYLQMNNLKTEDTAVYYCVRHGNFGNSYISYWAYWGQGTLVTVSSGGGGSGGGGSGGGGSQTVVTQEPSLTVSPGGTVTLTCGSSTGAVTSGNYPNWVQQKPGQAPRGLIGGTKFLAPGTPARFSGSLLGGKAALTLSGVQPEDEAEYYCVLWYSNRWVFGGGTKLTVL

SEQ ID NO: 186 - DNA, 747 bp, Artificial Sequence
  VH-VL of I2C
gaggtgcagctggtcgagtctggaggaggattggtgcagcctggagggtcattgaaactctcatgtgcagcctctggattcaccttcaataagtacgccatgaactgggtccgccaggctccaggaaagggtttggaatgggttgctcgcataagaagtaaatataataattatgcaacatattatgccgattcagtgaaagacaggttcaccatctccagagatgattcaaaaaacactgcctatctacaaatgaacaacttgaaaactgaggacactgccgtgtactactgtgtgagacatgggaacttcggtaatagctacatatcctactgggcttactggggccaagggactctggtcaccgtctcctcaggtggtggtggttctggcggcggcggctccggtggtggtggttctcagactgttgtgactcaggaaccttcactcaccgtatcacctggtggaacagtcacactcacttgtggctcctcgactggggctgttacatctggcaactacccaaactgggtccaacaaaaaccaggtcaggcaccccgtggtctaataggtgggactaagttcctcgcccccggtactcctgccagattctcaggctccctgcttggaggcaaggctgccctcaccctctcaggggtacagccagaggatgaggcagaatattactgtgttctatggtacagcaaccgctgggtgttcggtggaggaaccaaactgactgtccta

SEQ ID NO: 187 - protein, 249 aa, Artificial Sequence
  VH-VL-P of I2C
EVQLLESGGGLVQPGGSLKLSCAASGFTFNKYAMNWVRQAPGKGLEWVARIRSKYNNYATYYADSVKDRFTISRDDSKNTAYLQMNNLKTEDTAVYYCVRHGNFGNSYISYWAYWGQGTLVTVSSGGGGSGGGGSGGGGSELVVTQEPSLTVSPGGTVTLTCGSSTGAVTSGNYPNWVQQKPGQAPRGLIGGTKFLAPGTPARFSGSLLGGKAALTLSGVQPEDEAEYYCVLWYSNRWVFGGGTKLTVL

SEQ ID NO: 188 - DNA, 747 bp, Artificial Sequence
  VH-VL-P of I2C
gaggtgcagctgctcgagtctggaggaggattggtgcagcctggagggtcattgaaactctcatgtgcagcctctggattcaccttcaataagtacgccatgaactgggtccgccaggctccaggaaagggtttggaatgggttgctcgcataagaagtaaatataataattatgcaacatattatgccgattcagtgaaagacaggttcaccatctccagagatgattcaaaaaacactgcctatctacaaatgaacaacttgaaaactgaggacactgccgtgtactactgtgtgagacatgggaacttcggtaatagctacatatcctactgggcttactggggccaagggactctggtcaccgtctcctcaggtggtggtggttctggcggcggcggctccggtggtggtggttctgagctcgttgtgactcaggaaccttcactcaccgtatcacctggtggaacagtcacactcacttgtggctcctcgactggggctgttacatctggcaactacccaaactgggtccaacaaaaaccaggtcaggcaccccgtggtctaataggtgggactaagttcctcgcccccggtactcctgccagattctcaggctccctgcttggaggcaaggctgccctcaccctctcaggggtacagccagaggatgaggcagaatattactgtgttctatggtacagcaaccgctgggtgttcggtggaggaaccaaactgactgtccta

SEQ ID NO: 189 - protein, 500 aa, Artificial Sequence
  MCSP-G4 VH-VL x H2C VH-VL
QVQLVQSGAEVKRPGASMKVSCKASGYTFTNYYIHWVRQAPGQGLEWMGWINPNSGATNYAQKFQGRVTMTRDTSTSTVYMELSSLRSEDTAVYYCAKSWVSWFASWGQGTLVTVSSGGGGSGGGGSGGGGSDIVMTQSPDSLAVSLGERATINCKSSQSVLNSSNNRNYLAWYQQKPGQPPKLLIYWASTRESGVPDRFSGSGSGTDFTLTISGLQAEDVAVYYCQQHYSTPFTFGPGTKVDIKSGGGGSEVQLVESGGGLVQPGGSLKLSCAASGFTFNKYAMNWVRQAPGKGLEWVARIRSKYNNYATYYADSVKDRFTISRDDSKNTAYLQMNNLKTEDTAVYYCVRHGNFGNSYISYWAYWGQGTLVTVSSGGGGSGGGGSGGGGSQTVVTQEPSLTVSPGGTVTLTCGSSTGAVTSGYYPNWVQQKPGQAPRGLIGGTKFLAPGTPARFSGSLLGGKAALTLSGVQPEDEAEYYCALWYSNRWVFGGGTKLTVL

SEQ ID NO: 190 - DNA, 1500 bp, Artificial Sequence
  MCSP-G4 VH-VL x H2C VH-VL
caggtgcagctggtccagtctggggctgaggtgaagaggcctggggcctcaatgaaggtctcctgcaaggcttctgggtacaccttcaccaactactatatacactgggtgcgacaggcccctggacaaggtcttgagtggatgggttggatcaaccctaacagtggtgccacaaactatgcacagaagttccagggcagagtcaccatgaccagggacacgtccacgagcacagtctacatggagctgagcagcctgagatctgaggacacggccgtgtattactgtgcgaaatcctgggtctcctggtttgcttcctggggtcaaggaaccttggtcaccgtctcctcaggtggtggtggttctggcggcggcggctccggtggtggtggttctgatatcgtgatgacccagtctccagactccctggctgtgtctctgggcgagagggccaccatcaactgcaagtccagccagagtgttttaaacagctccaacaataggaactacttagcttggtaccagcagaaaccaggacagcctcctaagctgctcatttactgggcatctacccgggaatccggggtccctgaccgattcagtggcagcgggtctgggacagatttcactctcaccatcagtggcctgcaggctgaagatgtggcagtttattactgtcagcaacattatagtactccattcacttttggccctgggaccaaagtggatatcaaatccggaggtggtggatccgaggtgcagctggtcgagtctggaggaggattggtgcagcctggagggtcattgaaactctcatgtgcagcctctggattcaccttcaataagtacgccatgaactgggtccgccaggctccaggaaagggtttggaatgggttgctcgcataagaagtaaatataataattatgcaacatattatgccgattcagtgaaagacaggttcaccatctccagagatgattcaaaaaacactgcctatctacaaatgaacaacttgaaaactgaggacactgccgtgtactactgtgtgagacatgggaacttcggtaatagctacatatcctactgggcttactggggccaagggactctggtcaccgtctcctcaggtggtggtggttctggcggcggcggctccggtggtggtggttctcagactgttgtgactcaggaaccttcactcaccgtatcacctggtggaacagtcacactcacttgtggctcctcgactggggctgttacatctggctactacccaaactgggtccaacaaaaaccaggtcaggcaccccgtggtctaataggtgggactaagttcctcgcccccggtactcctgccagattctcaggctccctgcttggaggcaaggctgccctcaccctctcaggggtacagccagaggatgaggcagaatattactgtgctctatggtacagcaaccgctgggtgttcggtggaggaaccaaactgactgtccta

SEQ ID NO: 191 - protein, 500 aa, Artificial Sequence
  MCSP-G4 VH-VL x F12Q VH-VL
QVQLVQSGAEVKRPGASMKVSCKASGYTFTNYYIHWVRQAPGQGLEWMGWINPNSGATNYAQKFQGRVTMTRDTSTSTVYMELSSLRSEDTAVYYCAKSWVSWFASWGQGTLVTVSSGGGGSGGGGSGGGGSDIVMTQSPDSLAVSLGERATINCKSSQSVLNSSNNRNYLAWYQQKPGQPPKLLIYWASTRESGVPDRFSGSGSGTDFTLTISGLQAEDVAVYYCQQHYSTPFTFGPGTKVDIKSGGGGSEVQLVESGGGLVQPGGSLKLSCAASGFTFNSYAMNWVRQAPGKGLEWVARIRSKYNNYATYYADSVKGRFTISRDDSKNTAYLQMNNLKTEDTAVYYCVRHGNFGNSYVSWWAYWGQGTLVTVSSGGGGSGGGGSGGGGSQTVVTQEPSLTVSPGGTVTLTCGSSTGAVTSGNYPNWVQQKPGQAPRGLIGGTKFLAPGTPARFSGSLLGGKAALTLSGVQPEDEAEYYCVLWYSNRWVFGGGTKLTVL

SEQ ID NO: 192 - DNA, 1500 bp, Artificial Sequence
  MCSP-G4 VH-VL x F12Q VH-VL
caggtgcagctggtccagtctggggctgaggtgaagaggcctggggcctcaatgaaggtctcctgcaaggcttctgggtacaccttcaccaactactatatacactgggtgcgacaggcccctggacaaggtcttgagtggatgggttggatcaaccctaacagtggtgccacaaactatgcacagaagttccagggcagagtcaccatgaccagggacacgtccacgagcacagtctacatggagctgagcagcctgagatctgaggacacggccgtgtattactgtgcgaaatcctgggtctcctggtttgcttcctggggtcaaggaaccttggtcaccgtctcctcaggtggtggtggttctggcggcggcggctccggtggtggtggttctgatatcgtgatgacccagtctccagactccctggctgtgtctctgggcgagagggccaccatcaactgcaagtccagccagagtgttttaaacagctccaacaataggaactacttagcttggtaccagcagaaaccaggacagcctcctaagctgctcatttactgggcatctacccgggaatccggggtccctgaccgattcagtggcagcgggtctgggacagatttcactctcaccatcagtggcctgcaggctgaagatgtggcagtttattactgtcagcaacattatagtactccattcacttttggccctgggaccaaagtggatatcaaatccggaggtggtggatccgaggtgcagctggtcgagtctggaggaggattggtgcagcctggagggtcattgaaactctcatgtgcagcctctggattcaccttcaatagctacgccatgaactgggtccgccaggctccaggaaagggtttggaatgggttgctcgcataagaagtaaatataataattatgcaacatattatgccgattcagtgaaaggcaggttcaccatctccagagatgattcaaaaaacactgcctatctacaaatgaacaacttgaaaactgaggacactgccgtgtactactgtgtgagacatgggaacttcggtaatagctacgtttcctggtgggcttactggggccaagggactctggtcaccgtctcctcaggtggtggtggttctggcggcggcggctccggtggtggtggttctcagactgttgtgactcaggaaccttcactcaccgtatcacctggtggaacagtcacactcacttgtggctcctcgactggggctgttacatctggcaactacccaaactgggtccaacaaaaaccaggtcaggcaccccgtggtctaataggtgggactaagttcctcgcccccggtactcctgccagattctcaggctccctgcttggaggcaaggctgccctcaccctctcaggggtacagccagaggatgaggcagaatattactgtgttctatggtacagcaaccgctgggtgttcggtggaggaaccaaactgactgtccta

SEQ ID NO: 193 - protein, 500 aa, Artificial Sequence
  MCSP-G4 VH-VL-P x F6A VH-VL-P
QVQLVQSGAEVKRPGASMKVSCKASGYTFTNYYIHWVRQAPGQGLEWMGWINPNSGATNYAQKFQGRVTMTRDTSTSTVYMELSSLRSEDTAVYYCAKSWVSWFASWGQGTLVTVSSGGGGSGGGGSGGGGSDIVMTQSPDSLAVSLGERATINCKSSQSVLNSSNNRNYLAWYQQKPGQPPKLLIYWASTRESGVPDRFSGSGSGTDFTLTISGLQAEDVAVYYCQQHYSTPFTFGPGTKVDIKSGGGGSEVQLVESGGGLVQPGGSLKLSCAASGFTFNKYAMNWVRQAPGKGLEWVARIRSKYNNYATYYADSVKDRFTISRDDSKNTAYLQMNNLKTEDTAVYYCVRHGNFGNSYISYWAYWGQGTLVTVSSGGGGSGGGGSGGGGSQTVVTQEPSLTVSPGGTVTLTCGSSTGAVTSGNYPNWVQQKPGQAPRGLIGGTKFLAPGTPARFSGSLLGGKAALTLSGVQPEDEAEYYCVLWYSNRWVFGGGTKLTVL

SEQ ID NO: 194 - DNA, 1500 bp, Artificial Sequence
  MCSP-G4 VH-VL-P x F6A VH-VL-P
caggtgcagctggtccagtctggggctgaggtgaagaggcctggggcctcaatgaaggtctcctgcaaggcttctgggtacaccttcaccaactactatatacactgggtgcgacaggcccctggacaaggtcttgagtggatgggttggatcaaccctaacagtggtgccacaaactatgcacagaagttccagggcagagtcaccatgaccagggacacgtccacgagcacagtctacatggagctgagcagcctgagatctgaggacacggccgtgtattactgtgcgaaatcctgggtctcctggtttgcttcctggggtcaaggaaccttggtcaccgtctcctcaggtggtggtggttctggcggcggcggctccggtggtggtggttctgatatcgtgatgacccagtctccagactccctggctgtgtctctgggcgagagggccaccatcaactgcaagtccagccagagtgttttaaacagctccaacaataggaactacttagcttggtaccagcagaaaccaggacagcctcctaagctgctcatttactgggcatctacccgggaatccggggtccctgaccgattcagtggcagcgggtctgggacagatttcactctcaccatcagtggcctgcaggctgaagatgtggcagtttattactgtcagcaacattatagtactccattcacttttggccctgggaccaaagtggatatcaaatccggaggtggtggatccgaggtgcagctggtcgagtctggaggaggattggtgcagcctggagggtcattgaaactctcatgtgcagcctctggattcaccttcaataagtacgccatgaactgggtccgccaggctccaggaaagggtttggaatgggttgctcgcataagaagtaaatataataattatgcaacatattatgccgattcagtgaaagacaggttcaccatctccagagatgattcaaaaaacactgcctatctacaaatgaacaacttgaaaactgaggacactgccgtgtactactgtgtgagacatgggaacttcggtaatagctacatatcctactgggcttactggggccaagggactctggtcaccgtctcctcaggtggtggtggttctggcggcggcggctccggtggtggtggttctcagactgttgtgactcaggaaccttcactcaccgtatcacctggtggaacagtcacactcacttgtggctcctcgactggggctgttacatctggcaactacccaaactgggtccaacaaaaaccaggtcaggcaccccgtggtctaataggtgggactaagttcctcgcccccggtactcctgccagattctcaggctccctgcttggaggcaaggctgccctcaccctctcaggggtacagccagaggatgaggcagaatattactgtgttctatggtacagcaaccgctgggtgttcggtggaggaaccaaactgactgtccta

SEQ ID NO: 195 - protein, 500 aa, Artificial Sequence
  MCSP-G4 VH-VL-P x F6A VH-VL-P
QVQLVQSGAEVKRPGASMKVSCKASGYTFTNYYIHWVRQAPGQGLEWMGWINPNSGATNYAQKFQGRVTMTRDTSTSTVYMELSSLRSEDTAVYYCAKSWVSWFASWGQGTLVTVSSGGGGSGGGGSGGGGSELVMTQSPDSLAVSLGERATINCKSSQSVLNSSNNRNYLAWYQQKPGQPPKLLIYWASTRESGVPDRFSGSGSGTDFTLTISGLQAEDVAVYYCQQHYSTPFTFGPGTKVDIKSGGGGSEVQLLESGGGLVQPGGSLKLSCAASGFTFNIYAMNWVRQAPGKGLEWVARIRSKYNNYATYYADSVKSRFTISRDDSKNTAYLQMNNLKTEDTAVYYCVRHGNFGNSYVSFFAYWGQGTLVTVSSGGGGSGGGGSGGGGSELVVTQEPSLTVSPGGTVTLTCGSSTGAVTSGYYPNWVQQKPGQAPRGLIGGTKFLAPGTPARFSGSLLGGKAALTLSGVQPEDEAEYYCALWYSNRWVFGGGTKLTVL

SEQ ID NO: 196 - DNA, 1500 bp, Artificial Sequence
  MCSP-G4 VH-VL-P x F6A VH-VL-P
caggtgcagctggtccagtctggggctgaggtgaagaggcctggggcctcaatgaaggtctcctgcaaggcttctgggtacaccttcaccaactactatatacactgggtgcgacaggcccctggacaaggtcttgagtggatgggttggatcaaccctaacagtggtgccacaaactatgcacagaagttccagggcagagtcaccatgaccagggacacgtccacgagcacagtctacatggagctgagcagcctgagatctgaggacacggccgtgtattactgtgcgaaatcctgggtctcctggtttgcttcctggggtcaaggaaccttggtcaccgtctcctcaggtggtggtggttctggcggcggcggctccggtggtggtggttctgagctcgtgatgacccagtctccagactccctggctgtgtctctgggcgagagggccaccatcaactgcaagtccagccagagtgttttaaacagctccaacaataggaactacttagcttggtaccagcagaaaccaggacagcctcctaagctgctcatttactgggcatctacccgggaatccggggtccctgaccgattcagtggcagcgggtctgggacagatttcactctcaccatcagtggcctgcaggctgaagatgtggcagtttattactgtcagcaacattatagtactccattcacttttggccctgggaccaaagtggatatcaaatccggaggtggtggatccgaggtgcagctgctcgagtctggaggaggattggtgcagcctggagggtcattgaaactctcatgtgcagcctctggattcaccttcaatatctacgccatgaactgggtccgccaggctccaggaaagggtttggaatgggttgctcgcataagaagtaaatataataattatgcaacatattatgccgattcagtgaaaagcaggttcaccatctccagagatgattcaaaaaacactgcctatctacaaatgaacaacttgaaaactgaggacactgccgtgtactactgtgtgagacatgggaacttcggtaatagctacgtatccttcttcgcttactggggccaagggactctggtcaccgtctcctcaggtggtggtggttctggcggcggcggctccggtggtggtggttctgagctcgttgtgactcaggaaccttcactcaccgtatcacctggtggaacagtcacactcacttgtggctcctcgactggggctgttacatctggctactacccaaactgggtccaacaaaaaccaggtcaggcaccccgtggtctaataggtgggactaagttcctcgcccccggtactcctgccagattctcaggctccctgcttggaggcaaggctgccctcaccctctcaggggtacagccagaggatgaggcagaatattactgtgctctatggtacagcaaccgctgggtgttcggtggaggaaccaaactgactgtccta

SEQ ID NO: 197 - protein, 500 aa, Artificial Sequence
  MCSP-G4 VH-VL-P x H2C VH-VL-P
QVQLVQSGAEVKRPGASMKVSCKASGYTFTNYYIHWVRQAPGQGLEWMGWINPNSGATNYAQKFQGRVTMTRDTSTSTVYMELSSLRSEDTAVYYCAKSWVSWFASWGQGTLVTVSSGGGGSGGGGSGGGGSELVMTQSPDSLAVSLGERATINCKSSQSVLNSSNNRNYLAWYQQKPGQPPKLLIYWASTRESGVPDRFSGSGSGTDFTLTISGLQAEDVAVYYCQQHYSTPFTFGPGTKVDIKSGGGGSEVQLLESGGGLVQPGGSLKLSCAASGFTFNKYAMNWVRQAPGKGLEWVARIRSKYNNYATYYADSVKDRFTISRDDSKNTAYLQMNNLKTEDTAVYYCVRHGNFGNSYISYWAYWGQGTLVTVSSGGGGSGGGGSGGGGSELVVTQEPSLTVSPGGTVTLTCGSSTGAVTSGYYPNWVQQKPGQAPRGLIGGTKFLAPGTPARFSGSLLGGKAALTLSGVQPEDEAEYYCALWYSNRWVFGGGTKLTVL

SEQ ID NO: 198 - DNA, 1500 bp, Artificial Sequence
  MCSP-G4 VH-VL-P x H2C VH-VL-P
caggtgcagctggtccagtctggggctgaggtgaagaggcctggggcctcaatgaaggtctcctgcaaggcttctgggtacaccttcaccaactactatatacactgggtgcgacaggcccctggacaaggtcttgagtggatgggttggatcaaccctaacagtggtgccacaaactatgcacagaagttccagggcagagtcaccatgaccagggacacgtccacgagcacagtctacatggagctgagcagcctgagatctgaggacacggccgtgtattactgtgcgaaatcctgggtctcctggtttgcttcctggggtcaaggaaccttggtcaccgtctcctcaggtggtggtggttctggcggcggcggctccggtggtggtggttctgagctcgtgatgacccagtctccagactccctggctgtgtctctgggcgagagggccaccatcaactgcaagtccagccagagtgttttaaacagctccaacaataggaactacttagcttggtaccagcagaaaccaggacagcctcctaagctgctcatttactgggcatctacccgggaatccggggtccctgaccgattcagtggcagcgggtctgggacagatttcactctcaccatcagtggcctgcaggctgaagatgtggcagtttattactgtcagcaacattatagtactccattcacttttggccctgggaccaaagtggatatcaaatccggaggtggtggatccgaggtgcagctgctcgagtctggaggaggattggtgcagcctggagggtcattgaaactctcatgtgcagcctctggattcaccttcaataagtacgccatgaactgggtccgccaggctccaggaaagggtttggaatgggttgctcgcataagaagtaaatataataattatgcaacatattatgccgattcagtgaaagacaggttcaccatctccagagatgattcaaaaaacactgcctatctacaaatgaacaacttgaaaactgaggacactgccgtgtactactgtgtgagacatgggaacttcggtaatagctacatatcctactgggcttactggggccaagggactctggtcaccgtctcctcaggtggtggtggttctggcggcggcggctccggtggtggtggttctgagctcgttgtgactcaggaaccttcactcaccgtatcacctggtggaacagtcacactcacttgtggctcctcgactggggctgttacatctggctactacccaaactgggtccaacaaaaaccaggtcaggcaccccgtggtctaataggtgggactaagttcctcgcccccggtactcctgccagattctcaggctccctgcttggaggcaaggctgccctcaccctctcaggggtacagccagaggatgaggcagaatattactgtgctctatggtacagcaaccgctgggtgttcggtggaggaaccaaactgactgtccta

SEQ ID NO: 199 - protein, 500 aa, Artificial Sequence
  MCSP-G4 VH-VL-P x H1E VH-VL-P
QVQLVQSGAEVKRPGASMKVSCKASGYTFTNYYIHWVRQAPGQGLEWMGWINPNSGATNYAQKFQGRVTMTRDTSTSTVYMELSSLRSEDTAVYYCAKSWVSWFASWGQGTLVTVSSGGGGSGGGGSGGGGSELVMTQSPDSLAVSLGERATINCKSSQSVLNSSNNRNYLAWYQQKPGQPPKLLIYWASTRESGVPDRFSGSGSGTDFTLTISGLQAEDVAVYYCQQHYSTPFTFGPGTKVDIKSGGGGSEVQLLESGGGLEQPGGSLKLSCAASGFTFNSYAMNWVRQAPGKGLEWVARIRSKYNNYATYYADSVKGRFTISRDDSKNTAYLQMNNLKTEDTAVYYCVRHGNFGNSYLSFWAYWGQGTLVTVSSGGGGSGGGGSGGGGSELVVTQEPSLTVSPGGTVTLTCGSSTGAVTSGYYPNWVQQKPGQAPRGLIGGTKFLAPGTPARFSGSLLGGKAALTLSGVQPEDEAEYYCALWYSNRWVFGGGTKLTVL

SEQ ID NO: 200 - DNA, 1500 bp, Artificial Sequence
  MCSP-G4 VH-VL-P x H1E VH-VL-P
caggtgcagctggtccagtctggggctgaggtgaagaggcctggggcctcaatgaaggtctcctgcaaggcttctgggtacaccttcaccaactactatatacactgggtgcgacaggcccctggacaaggtcttgagtggatgggttggatcaaccctaacagtggtgccacaaactatgcacagaagttccagggcagagtcaccatgaccagggacacgtccacgagcacagtctacatggagctgagcagcctgagatctgaggacacggccgtgtattactgtgcgaaatcctgggtctcctggtttgcttcctggggtcaaggaaccttggtcaccgtctcctcaggtggtggtggttctggcggcggcggctccggtggtggtggttctgagctcgtgatgacccagtctccagactccctggctgtgtctctgggcgagagggccaccatcaactgcaagtccagccagagtgttttaaacagctccaacaataggaactacttagcttggtaccagcagaaaccaggacagcctcctaagctgctcatttactgggcatctacccgggaatccggggtccctgaccgattcagtggcagcgggtctgggacagatttcactctcaccatcagtggcctgcaggctgaagatgtggcagtttattactgtcagcaacattatagtactccattcacttttggccctgggaccaaagtggatatcaaatccggaggtggtggatccgaggtgcagctgctcgagtctggaggaggattggagcagcctggagggtcattgaaactctcatgtgcagcctctggattcaccttcaattcgtacgccatgaactgggtccgccaggctccaggaaagggtttggaatgggttgctcgcataagaagtaaatataataattatgcaacatattatgccgattcagtgaaagggaggttcaccatctccagagatgattcaaaaaacactgcctatctacaaatgaacaacttgaaaactgaggacactgccgtgtactactgtgtgagacatgggaacttcggtaatagctacctatccttctgggcttactggggccaagggactctggtcaccgtctcctcaggtggtggtggttctggcggcggcggctccggtggtggtggttctgagctcgttgtgactcaggaaccttcactcaccgtatcacctggtggaacagtcacactcacttgtggctcctcgactggggctgttacatctggctactacccaaactgggtccaacaaaaaccaggtcaggcaccccgtggtctaataggtgggactaagttcctcgcccccggtactcctgccagattctcaggctccctgcttggaggcaaggctgccctcaccctctcaggggtacagccagaggatgaggcagaatattactgtgctctatggtacagcaaccgctgggtgttcggtggaggaaccaaactgactgtccta

SEQ ID NO: 201 - protein, 500 aa, Artificial Sequence
  MCSP-G4 VH-VL-P x G4H VH-VL-P
QVQLVQSGAEVKRPGASMKVSCKASGYTFTNYYIHWVRQAPGQGLEWMGWINPNSGATNYAQKFQGRVTMTRDTSTSTVYMELSSLRSEDTAVYYCAKSWVSWFASWGQGTLVTVSSGGGGSGGGGSGGGGSELVMTQSPDSLAVSLGERATINCKSSQSVLNSSNNRNYLAWYQQKPGQPPKLLIYWASTRESGVPDRFSGSGSGTDFTLTISGLQAEDVAVYYCQQHYSTPFTFGPGTKVDIKSGGGGSEVQLLESGGGLVQPGGSLKLSCAASGFTFNRYAMNWVRQAPGKGLEWVARIRSKYNNYATYYADSVKGRFTISRDDSKNTAYLQMNNLKTEDTAVYYCVRHGNFGNSYLSYFAYWGQGTLVTVSSGGGGSGGGGSGGGGSELVVTQEPSLTVSPGGTVTLTCGSSTGAVTSGYYPNWVQQKPGQAPRGLIGGTKFLAPGTPARFSGSLLGGKAALTLSGVQPEDEAEYYCALWYSNRWVFGGGTKLTVL

SEQ ID NO: 202 - DNA, 1500 bp, Artificial Sequence
  MCSP-G4 VH-VL-P x G4H VH-VL-P
caggtgcagctggtccagtctggggctgaggtgaagaggcctggggcctcaatgaaggtctcctgcaaggcttctgggtacaccttcaccaactactatatacactgggtgcgacaggcccctggacaaggtcttgagtggatgggttggatcaaccctaacagtggtgccacaaactatgcacagaagttccagggcagagtcaccatgaccagggacacgtccacgagcacagtctacatggagctgagcagcctgagatctgaggacacggccgtgtattactgtgcgaaatcctgggtctcctggtttgcttcctggggtcaaggaaccttggtcaccgtctcctcaggtggtggtggttctggcggcggcggctccggtggtggtggttctgagctcgtgatgacccagtctccagactccctggctgtgtctctgggcgagagggccaccatcaactgcaagtccagccagagtgttttaaacagctccaacaataggaactacttagcttggtaccagcagaaaccaggacagcctcctaagctgctcatttactgggcatctacccgggaatccggggtccctgaccgattcagtggcagcgggtctgggacagatttcactctcaccatcagtggcctgcaggctgaagatgtggcagtttattactgtcagcaacattatagtactccattcacttttggccctgggaccaaagtggatatcaaatccggaggtggtggatccgaggtgcagctgctcgagtctggaggaggattggtgcagcctggagggtcattgaaactctcatgtgcagcctctggattcaccttcaatcgctacgccatgaactgggtccgccaggctccaggaaagggtttggaatgggttgctcgcataagaagtaaatataataattatgcaacatattatgccgattcagtgaaagggaggttcaccatctccagagatgattcaaaaaacactgcctatctacaaatgaacaacttgaaaactgaggacactgccgtgtactactgtgtgagacatgggaacttcggtaatagctacttatcctacttcgcttactggggccaagggactctggtcaccgtctcctcaggtggtggtggttctggcggcggcggctccggtggtggtggttctgagctcgttgtgactcaggaaccttcactcaccgtatcacctggtggaacagtcacactcacttgtggctcctcgactggggctgttacatctggctactacccaaactgggtccaacaaaaaccaggtcaggcaccccgtggtctaataggtgggactaagttcctcgcccccggtactcctgccagattctcaggctccctgcttggaggcaaggctgccctcaccctctcaggggtacagccagaggatgaggcagaatattactgtgctctatggtacagcaaccgctgggtgttcggtggaggaaccaaactgactgtccta

SEQ ID NO: 203 - protein, 500 aa, Artificial Sequence
  MCSP-G4 VH-VL-P x A2J VH-VL-P
QVQLVQSGAEVKRPGASMKVSCKASGYTFTNYYIHWVRQAPGQGLEWMGWINPNSGATNYAQKFQGRVTMTRDTSTSTVYMELSSLRSEDTAVYYCAKSWVSWFASWGQGTLVTVSSGGGGSGGGGSGGGGSELVMTQSPDSLAVSLGERATINCKSSQSVLNSSNNRNYLAWYQQKPGQPPKLLIYWASTRESGVPDRFSGSGSGTDFTLTISGLQAEDVAVYYCQQHYSTPFTFGPGTKVDIKSGGGGSEVQLLESGGGLVQPGGSLKLSCAASGFTFNVYAMNWVRQAPGKGLEWVARIRSKYNNYATYYADSVKKRFTISRDDSKNTAYLQMNNLKTEDTAVYYCVRHGNFGNSYLSWWAYWGQGTLVTVSSGGGGSGGGGSGGGGSELVVTQEPSLTVSPGGTVTLTCRSSTGAVTSGYYPNWVQQKPGQAPRGLIGATDMRPSGTPARFSGSLLGGKAALTLSGVQPEDEAEYYCALWYSNRWVFGGGTKLTVL

SEQ ID NO: 204 - DNA, 1500 bp, Artificial Sequence
  MCSP-G4 VH-VL-P x A2J VH-VL-P
caggtgcagctggtccagtctggggctgaggtgaagaggcctggggcctcaatgaaggtctcctgcaaggcttctgggtacaccttcaccaactactatatacactgggtgcgacaggcccctggacaaggtcttgagtggatgggttggatcaaccctaacagtggtgccacaaactatgcacagaagttccagggcagagtcaccatgaccagggacacgtccacgagcacagtctacatggagctgagcagcctgagatctgaggacacggccgtgtattactgtgcgaaatcctgggtctcctggtttgcttcctggggtcaaggaaccttggtcaccgtctcctcaggtggtggtggttctggcggcggcggctccggtggtggtggttctgagctcgtgatgacccagtctccagactccctggctgtgtctctgggcgagagggccaccatcaactgcaagtccagccagagtgttttaaacagctccaacaataggaactacttagcttggtaccagcagaaaccaggacagcctcctaagctgctcatttactgggcatctacccgggaatccggggtccctgaccgattcagtggcagcgggtctgggacagatttcactctcaccatcagtggcctgcaggctgaagatgtggcagtttattactgtcagcaacattatagtactccattcacttttggccctgggaccaaagtggatatcaaatccggaggtggtggatccgaggtgcagctgctcgagtctggaggaggattggtgcagcctggagggtcattgaaactctcatgtgcagcctctggattcaccttcaatgtctacgccatgaactgggtccgccaggctccaggaaagggtttggaatgggttgctcgcataagaagtaaatataataattatgcaacatattatgccgattcagtgaaaaagaggttcaccatctccagagatgattcaaaaaacactgcctatctacaaatgaacaacttgaaaactgaggacactgccgtgtactactgtgtgagacatgggaacttcggtaatagctacttatcctggtgggcttactggggccaagggactctggtcaccgtctcctcaggtggtggtggttctggcggcggcggctccggtggtggtggttctgagctcgttgtgactcaggaaccttcactcaccgtatcacctggtggaacagtcacactcacttgtcgctcctcgactggggctgttacatctggctactacccaaactgggtccaacaaaaaccaggtcaggcaccccgtggtctaataggtgccactgacatgaggccctctggtactcctgccagattctcaggctccctgcttggaggcaaggctgccctcaccctctcaggggtacagccagaggatgaggcagaatattactgtgctctatggtacagcaaccgctgggtgttcggtggaggaaccaaactgactgtccta

SEQ ID NO: 205 - protein, 500 aa, Artificial Sequence
  MCSP-G4 VH-VL-P x E1L VH-VL-P
QVQLVQSGAEVKRPGASMKVSCKASGYTFTNYYIHWVRQAPGQGLEWMGWINPNSGATNYAQKFQGRVTMTRDTSTSTVYMELSSLRSEDTAVYYCAKSWVSWFASWGQGTLVTVSSGGGGSGGGGSGGGGSELVMTQSPDSLAVSLGERATINCKSSQSVLNSSNNRNYLAWYQQKPGQPPKLLIYWASTRESGVPDRFSGSGSGTDFTLTISGLQAEDVAVYYCQQHYSTPFTFGPGTKVDIKSGGGGSEVQLLESGGGLVQPGGSLKLSCAASGFTFNKYAMNWVRQAPGKGLEWVARIRSKYNNYATYYADSVKSRFTISRDDSKNTAYLQMNNLKTEDTAVYYCVRHGNFGNSYTSYYAYWGQGTLVTVSSGGGGSGGGGSGGGGSELVVTQEPSLTVSPGGTVTLTCGSSTGAVTSGYYPNWVQQKPGQAPRGLIGGTKFLAPGTPARFSGSLLGGKAALTLSGVQPEDEAEYYCALWYSNRWVFGGGTKLTVL

SEQ ID NO: 206 - DNA, 1500 bp, Artificial Sequence
  MCSP-G4 VH-VL-P x E1L VH-VL-P
caggtgcagctggtccagtctggggctgaggtgaagaggcctggggcctcaatgaaggtctcctgcaaggcttctgggtacaccttcaccaactactatatacactgggtgcgacaggcccctggacaaggtcttgagtggatgggttggatcaaccctaacagtggtgccacaaactatgcacagaagttccagggcagagtcaccatgaccagggacacgtccacgagcacagtctacatggagctgagcagcctgagatctgaggacacggccgtgtattactgtgcgaaatcctgggtctcctggtttgcttcctggggtcaaggaaccttggtcaccgtctcctcaggtggtggtggttctggcggcggcggctccggtggtggtggttctgagctcgtgatgacccagtctccagactccctggctgtgtctctgggcgagagggccaccatcaactgcaagtccagccagagtgttttaaacagctccaacaataggaactacttagcttggtaccagcagaaaccaggacagcctcctaagctgctcatttactgggcatctacccgggaatccggggtccctgaccgattcagtggcagcgggtctgggacagatttcactctcaccatcagtggcctgcaggctgaagatgtggcagtttattactgtcagcaacattatagtactccattcacttttggccctgggaccaaagtggatatcaaatccggaggtggtggatccgaggtgcagctgctcgagtctggaggaggattggtgcagcctggagggtcattgaaactctcatgtgcagcctctggattcaccttcaataagtacgccatgaactgggtccgccaggctccaggaaagggtttggaatgggttgctcgcataagaagtaaatataataattatgcaacatattatgccgattcagtgaaatcgaggttcaccatctccagagatgattcaaaaaacactgcctatctacaaatgaacaacttgaaaactgaggacactgccgtgtactactgtgtgagacatgggaacttcggtaatagctacacatcctactacgcttactggggccaagggactctggtcaccgtctcctcaggtggtggtggttctggcggcggcggctccggtggtggtggttctgagctcgttgtgactcaggaaccttcactcaccgtatcacctggtggaacagtcacactcacttgtggctcctcgactggggctgttacatctggctactacccaaactgggtccaacaaaaaccaggtcaggcaccccgtggtctaataggtgggactaagttcctcgcccccggtactcctgccagattctcaggctccctgcttggaggcaaggctgccctcaccctctcaggggtacagccagaggatgaggcagaatattactgtgctctatggtacagcaaccgctgggtgttcggtggaggaaccaaactgactgtccta

SEQ ID NO: 207 - protein, 500 aa, Artificial Sequence
  MCSP-G4 VH-VL-P x E2M VH-VL-P
QVQLVQSGAEVKRPGASMKVSCKASGYTFTNYYIHWVRQAPGQGLEWMGWINPNSGATNYAQKFQGRVTMTRDTSTSTVYMELSSLRSEDTAVYYCAKSWVSWFASWGQGTLVTVSSGGGGSGGGGSGGGGSELVMTQSPDSLAVSLGERATINCKSSQSVLNSSNNRNYLAWYQQKPGQPPKLLIYWASTRESGVPDRFSGSGSGTDFTLTISGLQAEDVAVYYCQQHYSTPFTFGPGTKVDIKSGGGGSEVQLLESGGGLVQPGGSLKLSCAASGFTFNGYAMNWVRQAPGKGLEWVARIRSKYNNYATYYADSVKERFTISRDDSKNTAYLQMNNLKTEDTAVYYCVRHRNFGNSYLSWFAYWGQGTLVTVSSGGGGSGGGGSGGGGSELVVTQEPSLTVSPGGTVTLTCRSSTGAVTSGYYPNWVQQKPGQAPRGLIGATDMRPSGTPARFSGSLLGGKAALTLSGVQPEDEAEYYCALWYSNRWVFGGGTKLTVL

SEQ ID NO: 208 - DNA, 1500 bp, Artificial Sequence
  MCSP-G4 VH-VL-P x E2M VH-VL-P
caggtgcagctggtccagtctggggctgaggtgaagaggcctggggcctcaatgaaggtctcctgcaaggcttctgggtacaccttcaccaactactatatacactgggtgcgacaggcccctggacaaggtcttgagtggatgggttggatcaaccctaacagtggtgccacaaactatgcacagaagttccagggcagagtcaccatgaccagggacacgtccacgagcacagtctacatggagctgagcagcctgagatctgaggacacggccgtgtattactgtgcgaaatcctgggtctcctggtttgcttcctggggtcaaggaaccttggtcaccgtctcctcaggtggtggtggttctggcggcggcggctccggtggtggtggttctgagctcgtgatgacccagtctccagactccctggctgtgtctctgggcgagagggccaccatcaactgcaagtccagccagagtgttttaaacagctccaacaataggaactacttagcttggtaccagcagaaaccaggacagcctcctaagctgctcatttactgggcatctacccgggaatccggggtccctgaccgattcagtggcagcgggtctgggacagatttcactctcaccatcagtggcctgcaggctgaagatgtggcagtttattactgtcagcaacattatagtactccattcacttttggccctgggaccaaagtggatatcaaatccggaggtggtggatccgaggtgcagctgctcgagtctggaggaggattggtgcagcctggagggtcattgaaactctcatgtgcagcctctggattcaccttcaatggctacgccatgaactgggtccgccaggctccaggaaagggtttggaatgggttgctcgcataagaagtaaatataataattatgcaacatattatgccgattcagtgaaagagaggttcaccatctccagagatgattcaaaaaacactgcctatctacaaatgaacaacttgaaaactgaggacactgccgtgtactactgtgtgagacataggaacttcggtaatagctacttatcctggttcgcttactggggccaagggactctggtcaccgtctcctcaggtggtggtggttctggcggcggcggctccggtggtggtggttctgagctcgttgtgactcaggaaccttcactcaccgtatcacctggtggaacagtcacactcacttgtcgctcctcgactggggctgttacatctggctactacccaaactgggtccaacaaaaaccaggtcaggcaccccgtggtctaataggtgccactgacatgaggccctctggtactcctgccagattctcaggctccctgcttggaggcaaggctgccctcaccctctcaggggtacagccagaggatgaggcagaatattactgtgctctatggtacagcaaccgctgggtgttcggtggaggaaccaaactgactgtccta

SEQ ID NO: 209 - protein, 500 aa, Artificial Sequence
  MCSP-G4 VH-VL-P x F7O VH-VL-P
QVQLVQSGAEVKRPGASMKVSCKASGYTFTNYYIHWVRQAPGQGLEWMGWINPNSGATNYAQKFQGRVTMTRDTSTSTVYMELSSLRSEDTAVYYCAKSWVSWFASWGQGTLVTVSSGGGGSGGGGSGGGGSELVMTQSPDSLAVSLGERATINCKSSQSVLNSSNNRNYLAWYQQKPGQPPKLLIYWASTRESGVPDRFSGSGSGTDFTLTISGLQAEDVAVYYCQQHYSTPFTFGPGTKVDIKSGGGGSEVQLLESGGGLVQPGGSLKLSCAASGFTFNVYAMNWVRQAPGKGLEWVARIRSKYNNYATYYADSVKKRFTISRDDSKNTAYLQMNNLKTEDTAVYYCVRHGNFGNSYISWWAYWGQGTLVTVSSGGGGSGGGGSGGGGSELVVTQEPSLTVSPGGTVTLTCGSSTGAVTSGYYPNWVQQKPGQAPRGLIGGTKFLAPGTPARFSGSLLGGKAALTLSGVQPEDEAEYYCALWYSNRWVFGGGTKLTVL

SEQ ID NO: 210 - DNA, 1500 bp, Artificial Sequence
  MCSP-G4 VH-VL-P x F7O VH-VL-P
caggtgcagctggtccagtctggggctgaggtgaagaggcctggggcctcaatgaaggtctcctgcaaggcttctgggtacaccttcaccaactactatatacactgggtgcgacaggcccctggacaaggtcttgagtggatgggttggatcaaccctaacagtggtgccacaaactatgcacagaagttccagggcagagtcaccatgaccagggacacgtccacgagcacagtctacatggagctgagcagcctgagatctgaggacacggccgtgtattactgtgcgaaatcctgggtctcctggtttgcttcctggggtcaaggaaccttggtcaccgtctcctcaggtggtggtggttctggcggcggcggctccggtggtggtggttctgagctcgtgatgacccagtctccagactccctggctgtgtctctgggcgagagggccaccatcaactgcaagtccagccagagtgttttaaacagctccaacaataggaactacttagcttggtaccagcagaaaccaggacagcctcctaagctgctcatttactgggcatctacccgggaatccggggtccctgaccgattcagtggcagcgggtctgggacagatttcactctcaccatcagtggcctgcaggctgaagatgtggcagtttattactgtcagcaacattatagtactccattcacttttggccctgggaccaaagtggatatcaaatccggaggtggtggatccgaggtgcagctgctcgagtctggaggaggattggtgcagcctggagggtcattgaaactctcatgtgcagcctctggattcaccttcaatgtgtacgccatgaactgggtccgccaggctccaggaaagggtttggaatgggttgctcgcataagaagtaaatataataattatgcaacatattatgccgattcagtgaaaaagaggttcaccatctccagagatgattcaaaaaacactgcctatctacaaatgaacaacttgaaaactgaggacactgccgtgtactactgtgtgagacatgggaacttcggtaatagctacatatcctggtgggcttactggggccaagggactctggtcaccgtctcctcaggtggtggtggttctggcggcggcggctccggtggtggtggttctgagctcgttgtgactcaggaaccttcactcaccgtatcacctggtggaacagtcacactcacttgtggctcctcgactggggctgttacatctggctactacccaaactgggtccaacaaaaaccaggtcaggcaccccgtggtctaataggtgggactaagttcctcgcccccggtactcctgccagattctcaggctccctgcttggaggcaaggctgccctcaccctctcaggggtacagccagaggatgaggcagaatattactgtgctctatggtacagcaaccgctgggtgttcggtggaggaaccaaactgactgtccta

SEQ ID NO: 211 - protein, 500 aa, Artificial Sequence
  MCSP-G4 VH-VL-P x F12Q VH-VL
QVQLVQSGAEVKRPGASMKVSCKASGYTFTNYYIHWVRQAPGQGLEWMGWINPNSGATNYAQKFQGRVTMTRDTSTSTVYMELSSLRSEDTAVYYCAKSWVSWFASWGQGTLVTVSSGGGGSGGGGSGGGGSELVMTQSPDSLAVSLGERATINCKSSQSVLNSSNNRNYLAWYQQKPGQPPKLLIYWASTRESGVPDRFSGSGSGTDFTLTISGLQAEDVAVYYCQQHYSTPFTFGPGTKVDIKSGGGGSEVQLVESGGGLVQPGGSLKLSCAASGFTFNSYAMNWVRQAPGKGLEWVARIRSKYNNYATYYADSVKGRFTISRDDSKNTAYLQMNNLKTEDTAVYYCVRHGNFGNSYVSWWAYWGQGTLVTVSSGGGGSGGGGSGGGGSQTVVTQEPSLTVSPGGTVTLTCGSSTGAVTSGNYPNWVQQKPGQAPRGLIGGTKFLAPGTPARFSGSLLGGKAALTLSGVQPEDEAEYYCVLWYSNRWVFGGGTKLTVL

SEQ ID NO: 212 - DNA, 1500 bp, Artificial Sequence
  MCSP-G4 VH-VL-P x F12Q VH-VL
caggtgcagctggtccagtctggggctgaggtgaagaggcctggggcctcaatgaaggtctcctgcaaggcttctgggtacaccttcaccaactactatatacactgggtgcgacaggcccctggacaaggtcttgagtggatgggttggatcaaccctaacagtggtgccacaaactatgcacagaagttccagggcagagtcaccatgaccagggacacgtccacgagcacagtctacatggagctgagcagcctgagatctgaggacacggccgtgtattactgtgcgaaatcctgggtctcctggtttgcttcctggggtcaaggaaccttggtcaccgtctcctcaggtggtggtggttctggcggcggcggctccggtggtggtggttctgagctcgtgatgacccagtctccagactccctggctgtgtctctgggcgagagggccaccatcaactgcaagtccagccagagtgttttaaacagctccaacaataggaactacttagcttggtaccagcagaaaccaggacagcctcctaagctgctcatttactgggcatctacccgggaatccggggtccctgaccgattcagtggcagcgggtctgggacagatttcactctcaccatcagtggcctgcaggctgaagatgtggcagtttattactgtcagcaacattatagtactccattcacttttggccctgggaccaaagtggatatcaaatccggaggtggtggatccgaggtgcagctggtcgagtctggaggaggattggtgcagcctggagggtcattgaaactctcatgtgcagcctctggattcaccttcaatagctacgccatgaactgggtccgccaggctccaggaaagggtttggaatgggttgctcgcataagaagtaaatataataattatgcaacatattatgccgattcagtgaaaggcaggttcaccatctccagagatgattcaaaaaacactgcctatctacaaatgaacaacttgaaaactgaggacactgccgtgtactactgtgtgagacatgggaacttcggtaatagctacgtttcctggtgggcttactggggccaagggactctggtcaccgtctcctcaggtggtggtggttctggcggcggcggctccggtggtggtggttctcagactgttgtgactcaggaaccttcactcaccgtatcacctggtggaacagtcacactcacttgtggctcctcgactggggctgttacatctggcaactacccaaactgggtccaacaaaaaccaggtcaggcaccccgtggtctaataggtgggactaagttcctcgcccccggtactcctgccagattctcaggctccctgcttggaggcaaggctgccctcaccctctcaggggtacagccagaggatgaggcagaatattactgtgttctatggtacagcaaccgctgggtgttcggtggaggaaccaaactgactgtccta

SEQ ID NO: 213 - protein, 500 aa, Artificial Sequence
  MCSP-G4 VH-VL-P x I2C VH-VL
QVQLVQSGAEVKRPGASMKVSCKASGYTFTNYYIHWVRQAPGQGLEWMGWINPNSGATNYAQKFQGRVTMTRDTSTSTVYMELSSLRSEDTAVYYCAKSWVSWFASWGQGTLVTVSSGGGGSGGGGSGGGGSELVMTQSPDSLAVSLGERATINCKSSQSVLNSSNNRNYLAWYQQKPGQPPKLLIYWASTRESGVPDRFSGSGSGTDFTLTISGLQAEDVAVYYCQQHYSTPFTFGPGTKVDIKSGGGGSEVQLVESGGGLVQPGGSLKLSCAASGFTFNKYAMNWVRQAPGKGLEWVARIRSKYNNYATYYADSVKDRFTISRDDSKNTAYLQMNNLKTEDTAVYYCVRHGNFGNSYISYWAYWGQGTLVTVSSGGGGSGGGGSGGGGSQTVVTQEPSLTVSPGGTVTLTCGSSTGAVTSGNYPNWVQQKPGQAPRGLIGGTKFLAPGTPARFSGSLLGGKAALTLSGVQPEDEAEYYCVLWYSNRWVFGGGTKLTVL

SEQ ID NO: 214 - DNA, 1500 bp, Artificial Sequence
  MCSP-G4 VH-VL-P x I2C VH-VL
caggtgcagctggtccagtctggggctgaggtgaagaggcctggggcctcaatgaaggtctcctgcaaggcttctgggtacaccttcaccaactactatatacactgggtgcgacaggcccctggacaaggtcttgagtggatgggttggatcaaccctaacagtggtgccacaaactatgcacagaagttccagggcagagtcaccatgaccagggacacgtccacgagcacagtctacatggagctgagcagcctgagatctgaggacacggccgtgtattactgtgcgaaatcctgggtctcctggtttgcttcctggggtcaaggaaccttggtcaccgtctcctcaggtggtggtggttctggcggcggcggctccggtggtggtggttctgagctcgtgatgacccagtctccagactccctggctgtgtctctgggcgagagggccaccatcaactgcaagtccagccagagtgttttaaacagctccaacaataggaactacttagcttggtaccagcagaaaccaggacagcctcctaagctgctcatttactgggcatctacccgggaatccggggtccctgaccgattcagtggcagcgggtctgggacagatttcactctcaccatcagtggcctgcaggctgaagatgtggcagtttattactgtcagcaacattatagtactccattcacttttggccctgggaccaaagtggatatcaaatccggaggtggtggatccgaggtgcagctggtcgagtctggaggaggattggtgcagcctggagggtcattgaaactctcatgtgcagcctctggattcaccttcaataagtacgccatgaactgggtccgccaggctccaggaaagggtttggaatgggttgctcgcataagaagtaaatataataattatgcaacatattatgccgattcagtgaaagacaggttcaccatctccagagatgattcaaaaaacactgcctatctacaaatgaacaacttgaaaactgaggacactgccgtgtactactgtgtgagacatgggaacttcggtaatagctacatatcctactgggcttactggggccaagggactctggtcaccgtctcctcaggtggtggtggttctggcggcggcggctccggtggtggtggttctcagactgttgtgactcaggaaccttcactcaccgtatcacctggtggaacagtcacactcacttgtggctcctcgactggggctgttacatctggcaactacccaaactgggtccaacaaaaaccaggtcaggcaccccgtggtctaataggtgggactaagttcctcgcccccggtactcctgccagattctcaggctccctgcttggaggcaaggctgccctcaccctctcaggggtacagccagaggatgaggcagaatattactgtgttctatggtacagcaaccgctgggtgttcggtggaggaaccaaactgactgtccta

SEQ ID NO: 215 - protein, 500 aa, Artificial Sequence
  MCSP-D2 VH-VL x H2C VH-VL
QVQLVQSGAEVKKPGASVKVSCKASGYTFTGYYMHWVRQAPGQGLEWMGWINPNSGGTSYAQKFQGRVTMTRDTSTSTVYMELSNLRSDDTAVYYCAKSWVSWFASWGQGTLVTVSSGGGGSGGGGSGGGGSDIVMTQSPDSLAVSLGERATINCKSSQSVLNSSNNRNYLAWYQQKPGQPPKLLIYWASTRESGVPDRFSGSGSGTDFTLTISGLQAEDVAVYYCQQHYSTPFTFGPGTKVDIKSGGGGSEVQLVESGGGLVQPGGSLKLSCAASGFTFNKYAMNWVRQAPGKGLEWVARIRSKYNNYATYYADSVKDRFTISRDDSKNTAYLQMNNLKTEDTAVYYCVRHGNFGNSYISYWAYWGQGTLVTVSSGGGGSGGGGSGGGGSQTVVTQEPSLTVSPGGTVTLTCGSSTGAVTSGYYPNWVQQKPGQAPRGLIGGTKFLAPGTPARFSGSLLGGKAALTLSGVQPEDEAEYYCALWYSNRWVFGGGTKLTVL

SEQ ID NO: 216 - DNA, 1500 bp, Artificial Sequence
  MCSP-D2 VH-VL x H2C VH-VL
caggtgcagctggtccagtctggggctgaggtgaagaagcctggggcctcagtgaaggtctcctgcaaggcttctggatacaccttcaccggctactatatgcactgggtgcgacaggcccctggacaagggcttgagtggatgggatggatcaaccctaacagtggtggcacaagctacgcacagaagttccagggcagagtcaccatgactagggacacgtccacgagcacagtctacatggagctgagcaacctgagatctgacgacacggccgtgtattactgtgcgaaatcctgggtctcctggtttgcttcctggggtcaaggaaccttggtcaccgtctcctcaggtggtggtggttctggcggcggcggctccggtggtggtggttctgatatcgtgatgacccagtctccagactccctggctgtgtctctgggcgagagggccaccatcaactgcaagtccagccagagtgttttaaacagctccaacaataggaactacttagcttggtaccagcagaaaccaggacagcctcctaagctgctcatttactgggcatctacccgggaatccggggtccctgaccgattcagtggcagcgggtctgggacagatttcactctcaccatcagtggcctgcaggctgaagatgtggcagtttattactgtcagcaacattatagtactccattcacttttggccctgggaccaaagtggatatcaaatccggaggtggtggatccgaggtgcagctggtcgagtctggaggaggattggtgcagcctggagggtcattgaaactctcatgtgcagcctctggattcaccttcaataagtacgccatgaactgggtccgccaggctccaggaaagggtttggaatgggttgctcgcataagaagtaaatataataattatgcaacatattatgccgattcagtgaaagacaggttcaccatctccagagatgattcaaaaaacactgcctatctacaaatgaacaacttgaaaactgaggacactgccgtgtactactgtgtgagacatgggaacttcggtaatagctacatatcctactgggcttactggggccaagggactctggtcaccgtctcctcaggtggtggtggttctggcggcggcggctccggtggtggtggttctcagactgttgtgactcaggaaccttcactcaccgtatcacctggtggaacagtcacactcacttgtggctcctcgactggggctgttacatctggctactacccaaactgggtccaacaaaaaccaggtcaggcaccccgtggtctaataggtgggactaagttcctcgcccccggtactcctgccagattctcaggctccctgcttggaggcaaggctgccctcaccctctcaggggtacagccagaggatgaggcagaatattactgtgctctatggtacagcaaccgctgggtgttcggtggaggaaccaaactgactgtccta

SEQ ID NO: 217 - protein, 500 aa, Artificial Sequence
  MCSP-D2 VH-VL x F12Q VH-VL
QVQLVQSGAEVKKPGASVKVSCKASGYTFTGYYMHWVRQAPGQGLEWMGWINPNSGGTSYAQKFQGRVTMTRDTSTSTVYMELSNLRSDDTAVYYCAKSWVSWFASWGQGTLVTVSSGGGGSGGGGSGGGGSDIVMTQSPDSLAVSLGERATINCKSSQSVLNSSNNRNYLAWYQQKPGQPPKLLIYWASTRESGVPDRFSGSGSGTDFTLTISGLQAEDVAVYYCQQHYSTPFTFGPGTKVDIKSGGGGSEVQLVESGGGLVQPGGSLKLSCAASGFTFNSYAMNWVRQAPGKGLEWVARIRSKYNNYATYYADSVKGRFTISRDDSKNTAYLQMNNLKTEDTAVYYCVRHGNFGNSYVSWWAYWGQGTLVTVSSGGGGSGGGGSGGGGSQTVVTQEPSLTVSPGGTVTLTCGSSTGAVTSGNYPNWVQQKPGQAPRGLIGGTKFLAPGTPARFSGSLLGGKAALTLSGVQPEDEAEYYCVLWYSNRWVFGGGTKLTVL

SEQ ID NO: 218 - DNA, 1500 bp, Artificial Sequence
  MCSP-D2 VH-VL x F12Q VH-VL
caggtgcagctggtccagtctggggctgaggtgaagaagcctggggcctcagtgaaggtctcctgcaaggcttctggatacaccttcaccggctactatatgcactgggtgcgacaggcccctggacaagggcttgagtggatgggatggatcaaccctaacagtggtggcacaagctacgcacagaagttccagggcagagtcaccatgactagggacacgtccacgagcacagtctacatggagctgagcaacctgagatctgacgacacggccgtgtattactgtgcgaaatcctgggtctcctggtttgcttcctggggtcaaggaaccttggtcaccgtctcctcaggtggtggtggttctggcggcggcggctccggtggtggtggttctgatatcgtgatgacccagtctccagactccctggctgtgtctctgggcgagagggccaccatcaactgcaagtccagccagagtgttttaaacagctccaacaataggaactacttagcttggtaccagcagaaaccaggacagcctcctaagctgctcatttactgggcatctacccgggaatccggggtccctgaccgattcagtggcagcgggtctgggacagatttcactctcaccatcagtggcctgcaggctgaagatgtggcagtttattactgtcagcaacattatagtactccattcacttttggccctgggaccaaagtggatatcaaatccggaggtggtggatccgaggtgcagctggtcgagtctggaggaggattggtgcagcctggagggtcattgaaactctcatgtgcagcctctggattcaccttcaatagctacgccatgaactgggtccgccaggctccaggaaagggtttggaatgggttgctcgcataagaagtaaatataataattatgcaacatattatgccgattcagtgaaaggcaggttcaccatctccagagatgattcaaaaaacactgcctatctacaaatgaacaacttgaaaactgaggacactgccgtgtactactgtgtgagacatgggaacttcggtaatagctacgtttcctggtgggcttactggggccaagggactctggtcaccgtctcctcaggtggtggtggttctggcggcggcggctccggtggtggtggttctcagactgttgtgactcaggaaccttcactcaccgtatcacctggtggaacagtcacactcacttgtggctcctcgactggggctgttacatctggcaactacccaaactgggtccaacaaaaaccaggtcaggcaccccgtggtctaataggtgggactaagttcctcgcccccggtactcctgccagattctcaggctccctgcttggaggcaaggctgccctcaccctctcaggggtacagccagaggatgaggcagaatattactgtgttctatggtacagcaaccgctgggtgttcggtggaggaaccaaactgactgtccta

SEQ ID NO: 219 - protein, 500 aa, Artificial Sequence
  MCSP-D2 VH-VL x I2C VH-VL
QVQLVQSGAEVKKPGASVKVSCKASGYTFTGYYMHWVRQAPGQGLEWMGWINPNSGGTSYAQKFQGRVTMTRDTSTSTVYMELSNLRSDDTAVYYCAKSWVSWFASWGQGTLVTVSSGGGGSGGGGSGGGGSDIVMTQSPDSLAVSLGERATINCKSSQSVLNSSNNRNYLAWYQQKPGQPPKLLIYWASTRESGVPDRFSGSGSGTDFTLTISGLQAEDVAVYYCQQHYSTPFTFGPGTKVDIKSGGGGSEVQLVESGGGLVQPGGSLKLSCAASGFTFNKYAMNWVRQAPGKGLEWVARIRSKYNNYATYYADSVKDRFTISRDDSKNTAYLQMNNLKTEDTAVYYCVRHGNFGNSYISYWAYWGQGTLVTVSSGGGGSGGGGSGGGGSQTVVTQEPSLTVSPGGTVTLTCGSSTGAVTSGNYPNWVQQKPGQAPRGLIGGTKFLAPGTPARFSGSLLGGKAALTLSGVQPEDEAEYYCVLWYSNRWVFGGGTKLTVL

SEQ ID NO: 220 - DNA, 1500 bp, Artificial Sequence
  MCSP-D2 VH-VL x I2C VH-VL
caggtgcagctggtccagtctggggctgaggtgaagaagcctggggcctcagtgaaggtctcctgcaaggcttctggatacaccttcaccggctactatatgcactgggtgcgacaggcccctggacaagggcttgagtggatgggatggatcaaccctaacagtggtggcacaagctacgcacagaagttccagggcagagtcaccatgactagggacacgtccacgagcacagtctacatggagctgagcaacctgagatctgacgacacggccgtgtattactgtgcgaaatcctgggtctcctggtttgcttcctggggtcaaggaaccttggtcaccgtctcctcaggtggtggtggttctggcggcggcggctccggtggtggtggttctgatatcgtgatgacccagtctccagactccctggctgtgtctctgggcgagagggccaccatcaactgcaagtccagccagagtgttttaaacagctccaacaataggaactacttagcttggtaccagcagaaaccaggacagcctcctaagctgctcatttactgggcatctacccgggaatccggggtccctgaccgattcagtggcagcgggtctgggacagatttcactctcaccatcagtggcctgcaggctgaagatgtggcagtttattactgtcagcaacattatagtactccattcacttttggccctgggaccaaagtggatatcaaatccggaggtggtggatccgaggtgcagctggtcgagtctggaggaggattggtgcagcctggagggtcattgaaactctcatgtgcagcctctggattcaccttcaataagtacgccatgaactgggtccgccaggctccaggaaagggtttggaatgggttgctcgcataagaagtaaatataataattatgcaacatattatgccgattcagtgaaagacaggttcaccatctccagagatgattcaaaaaacactgcctatctacaaatgaacaacttgaaaactgaggacactgccgtgtactactgtgtgagacatgggaacttcggtaatagctacatatcctactgggcttactggggccaagggactctggtcaccgtctcctcaggtggtggtggttctggcggcggcggctccggtggtggtggttctcagactgttgtgactcaggaaccttcactcaccgtatcacctggtggaacagtcacactcacttgtggctcctcgactggggctgttacatctggcaactacccaaactgggtccaacaaaaaccaggtcaggcaccccgtggtctaataggtgggactaagttcctcgcccccggtactcctgccagattctcaggctccctgcttggaggcaaggctgccctcaccctctcaggggtacagccagaggatgaggcagaatattactgtgttctatggtacagcaaccgctgggtgttcggtggaggaaccaaactgactgtccta

SEQ ID NO: 221 - protein, 500 aa, Artificial Sequence
  MCSP-D2 VH-VL-P x H2C VH-VL-P
QVQLVQSGAEVKKPGASVKVSCKASGYTFTGYYMHWVRQAPGQGLEWMGWINPNSGGTSYAQKFQGRVTMTRDTSTSTVYMELSNLRSDDTAVYYCAKSWVSWFASWGQGTLVTVSSGGGGSGGGGSGGGGSELVMTQSPDSLAVSLGERATINCKSSQSVLNSSNNRNYLAWYQQKPGQPPKLLIYWASTRESGVPDRFSGSGSGTDFTLTISGLQAEDVAVYYCQQHYSTPFTFGPGTKVDIKSGGGGSEVQLLESGGGLVQPGGSLKLSCAASGFTFNKYAMNWVRQAPGKGLEWVARIRSKYNNYATYYADSVKDRFTISRDDSKNTAYLQMNNLKTEDTAVYYCVRHGNFGNSYISYWAYWGQGTLVTVSSGGGGSGGGGSGGGGSELVVTQEPSLTVSPGGTVTLTCGSSTGAVTSGYYPNWVQQKPGQAPRGLIGGTKFLAPGTPARFSGSLLGGKAALTLSGVQPEDEAEYYCALWYSNRWVFGGGTKLTVL

SEQ ID NO: 222 - DNA, 1500 bp, Artificial Sequence
  MCSP-D2 VH-VL-P x H2C VH-VL-P
caggtgcagctggtccagtctggggctgaggtgaagaagcctggggcctcagtgaaggtctcctgcaaggcttctggatacaccttcaccggctactatatgcactgggtgcgacaggcccctggacaagggcttgagtggatgggatggatcaaccctaacagtggtggcacaagctacgcacagaagttccagggcagagtcaccatgactagggacacgtccacgagcacagtctacatggagctgagcaacctgagatctgacgacacggccgtgtattactgtgcgaaatcctgggtctcctggtttgcttcctggggtcaaggaaccttggtcaccgtctcctcaggtggtggtggttctggcggcggcggctccggtggtggtggttctgagctcgtgatgacccagtctccagactccctggctgtgtctctgggcgagagggccaccatcaactgcaagtccagccagagtgttttaaacagctccaacaataggaactacttagcttggtaccagcagaaaccaggacagcctcctaagctgctcatttactgggcatctacccgggaatccggggtccctgaccgattcagtggcagcgggtctgggacagatttcactctcaccatcagtggcctgcaggctgaagatgtggcagtttattactgtcagcaacattatagtactccattcacttttggccctgggaccaaagtggatatcaaatccggaggtggtggatccgaggtgcagctgctcgagtctggaggaggattggtgcagcctggagggtcattgaaactctcatgtgcagcctctggattcaccttcaataagtacgccatgaactgggtccgccaggctccaggaaagggtttggaatgggttgctcgcataagaagtaaatataataattatgcaacatattatgccgattcagtgaaagacaggttcaccatctccagagatgattcaaaaaacactgcctatctacaaatgaacaacttgaaaactgaggacactgccgtgtactactgtgtgagacatgggaacttcggtaatagctacatatcctactgggcttactggggccaagggactctggtcaccgtctcctcaggtggtggtggttctggcggcggcggctccggtggtggtggttctgagctcgttgtgactcaggaaccttcactcaccgtatcacctggtggaacagtcacactcacttgtggctcctcgactggggctgttacatctggctactacccaaactgggtccaacaaaaaccaggtcaggcaccccgtggtctaataggtgggactaagttcctcgcccccggtactcctgccagattctcaggctccctgcttggaggcaaggctgccctcaccctctcaggggtacagccagaggatgaggcagaatattactgtgctctatggtacagcaaccgctgggtgttcggtggaggaaccaaactgactgtccta

SEQ ID NO: 223 - protein, 499 aa, Artificial Sequence
  MCSP-F9 VH-VL x H2C VH-VL
QVQLQESGPGLVKPSETLSLTCVVSGGSISSSNWWSWVRQPPGKGLEWLGTIYYNGNTYYNPSLKSRVTISVDTSKNQFSLRLSSVTAADTAVYYCAKSWVSWFASWGQGTLVTVSSGGGGSGGGGSGGGGSDIVMTQSPDSLAVSLGERATINCKSSQSVLSSSNNKNYLNWYQQKPGQPPKLLIYWASTRESGVPDRFSGSGSGTDFTLTISSLQAEDVAVYYCQQHYSVPFTFGPGTKVDIKGGGGSEVQLVESGGGLVQPGGSLKLSCAASGFTFNKYAMNWVRQAPGKGLEWVARIRSKYNNYATYYADSVKDRFTISRDDSKNTAYLQMNNLKTEDTAVYYCVRHGNFGNSYISYWAYWGQGTLVTVSSGGGGSGGGGSGGGGSQTVVTQEPSLTVSPGGTVTLTCGSSTGAVTSGYYPNWVQQKPGQAPRGLIGGTKFLAPGTPARFSGSLLGGKAALTLSGVQPEDEAEYYCALWYSNRWVFGGGTKLTVL

SEQ ID NO: 224 - DNA, 1497 bp, Artificial Sequence
  MCSP-F9 VH-VL x H2C VH-VL
caggtgcagctgcaagagtctggcccaggactggtgaagccttcggagaccctgtccctcacctgcgttgtctctggtggctccatcagcagtagtaactggtggagctgggtccgccagcccccagggaagggactggagtggcttgggactatctattataatgggaatacctactacaacccgtccctcaagagtcgagtcaccatctccgtagacacgtccaagaaccagttctccctgaggctgagctctgtgaccgccgcagacacggccgtgtattactgtgcgaaatcctgggtctcctggtttgcttcctggggtcaaggaaccttggtcaccgtctcctcaggtggtggtggttctggcggcggcggctccggtggtggtggttctgatatcgtgatgacacagtctccagactccctggctgtgtctctgggcgagagggccaccatcaactgcaagtccagccagagtgtcttatccagctccaacaataagaactacttaaattggtaccagcagaaaccaggacagcctcctaagttgctcatttactgggcatctacccgggaatccggggtccctgaccgattcagtggcagcgggtctgggacagatttcactctcaccatcagcagcctgcaggctgaagatgtggcagtttattactgtcagcaacattatagtgttccattcactttcggccctgggaccaaagtggatatcaaaggaggtggtggctccgaggtgcagctggtcgagtctggaggaggattggtgcagcctggagggtcattgaaactctcatgtgcagcctctggattcaccttcaataagtacgccatgaactgggtccgccaggctccaggaaagggtttggaatgggttgctcgcataagaagtaaatataataattatgcaacatattatgccgattcagtgaaagacaggttcaccatctccagagatgattcaaaaaacactgcctatctacaaatgaacaacttgaaaactgaggacactgccgtgtactactgtgtgagacatgggaacttcggtaatagctacatatcctactgggcttactggggccaagggactctggtcaccgtctcctcaggtggtggtggttctggcggcggcggctccggtggtggtggttctcagactgttgtgactcaggaaccttcactcaccgtatcacctggtggaacagtcacactcacttgtggctcctcgactggggctgttacatctggctactacccaaactgggtccaacaaaaaccaggtcaggcaccccgtggtctaataggtgggactaagttcctcgcccccggtactcctgccagattctcaggctccctgcttggaggcaaggctgccctcaccctctcaggggtacagccagaggatgaggcagaatattactgtgctctatggtacagcaaccgctgggtgttcggtggaggaaccaaactgactgtccta

SEQ ID NO: 225 - protein, 500 aa, Artificial Sequence
  MCSP-F9 VH-VL-P x H2C VH-VL-P
EVQLQESGPGLVKPSETLSLTCVVSGGSISSSNWWSWVRQPPGKGLEWLGTIYYNGNTYYNPSLKSRVTISVDTSKNQFSLRLSSVTAADTAVYYCAKSWVSWFASWGQGTLVTVSSGGGGSGGGGSGGGGSELVMTQSPDSLAVSLGERATINCKSSQSVLSSSNNKNYLNWYQQKPGQPPKLLIYWASTRESGVPDRFSGSGSGTDFTLTISSLQAEDVAVYYCQQHYSVPFTFGPGTKVDIKSGGGGSEVQLLESGGGLVQPGGSLKLSCAASGFTFNKYAMNWVRQAPGKGLEWVARIRSKYNNYATYYADSVKDRFTISRDDSKNTAYLQMNNLKTEDTAVYYCVRHGNFGNSYISYWAYWGQGTLVTVSSGGGGSGGGGSGGGGSELVVTQEPSLTVSPGGTVTLTCGSSTGAVTSGYYPNWVQQKPGQAPRGLIGGTKFLAPGTPARFSGSLLGGKAALTLSGVQPEDEAEYYCALWYSNRWVFGGGTKLTVL

SEQ ID NO: 226 - DNA, 1500 bp, Artificial Sequence
  MCSP-F9 VH-VL-P x H2C VH-VL-P
gaggtgcagctgcaagagtctggcccaggactggtgaagccttcggagaccctgtccctcacctgcgttgtctctggtggctccatcagcagtagtaactggtggagctgggtccgccagcccccagggaagggactggagtggcttgggactatctattataatgggaatacctactacaacccgtccctcaagagtcgagtcaccatctccgtagacacgtccaagaaccagttctccctgaggctgagctctgtgaccgccgcagacacggccgtgtattactgtgcgaaatcctgggtctcctggtttgcttcctggggtcaaggaaccttggtcaccgtctcctcaggtggtggtggttctggcggcggcggctccggtggtggtggttctgagctcgtgatgacacagtctccagactccctggctgtgtctctgggcgagagggccaccatcaactgcaagtccagccagagtgtcttatccagctccaacaataagaactacttaaattggtaccagcagaaaccaggacagcctcctaagttgctcatttactgggcatctacccgggaatccggggtccctgaccgattcagtggcagcgggtctgggacagatttcactctcaccatcagcagcctgcaggctgaagatgtggcagtttattactgtcagcaacattatagtgttccattcactttcggccctgggaccaaagtggatatcaaatccggaggtggtggatccgaggtgcagctgctcgagtctggaggaggattggtgcagcctggagggtcattgaaactctcatgtgcagcctctggattcaccttcaataagtacgccatgaactgggtccgccaggctccaggaaagggtttggaatgggttgctcgcataagaagtaaatataataattatgcaacatattatgccgattcagtgaaagacaggttcaccatctccagagatgattcaaaaaacactgcctatctacaaatgaacaacttgaaaactgaggacactgccgtgtactactgtgtgagacatgggaacttcggtaatagctacatatcctactgggcttactggggccaagggactctggtcaccgtctcctcaggtggtggtggttctggcggcggcggctccggtggtggtggttctgagctcgttgtgactcaggaaccttcactcaccgtatcacctggtggaacagtcacactcacttgtggctcctcgactggggctgttacatctggctactacccaaactgggtccaacaaaaaccaggtcaggcaccccgtggtctaataggtgggactaagttcctcgcccccggtactcctgccagattctcaggctccctgcttggaggcaaggctgccctcaccctctcaggggtacagccagaggatgaggcagaatattactgtgctctatggtacagcaaccgctgggtgttcggtggaggaaccaaactgactgtccta

SEQ ID NO: 227 - protein, 500 aa, Artificial Sequence
  MCSP-F9 VH-VL-P x G4H VH-VL-P
EVQLQESGPGLVKPSETLSLTCVVSGGSISSSNWWSWVRQPPGKGLEWLGTIYYNGNTYYNPSLKSRVTISVDTSKNQFSLRLSSVTAADTAVYYCAKSWVSWFASWGQGTLVTVSSGGGGSGGGGSGGGGSELVMTQSPDSLAVSLGERATINCKSSQSVLSSSNNKNYLNWYQQKPGQPPKLLIYWASTRESGVPDRFSGSGSGTDFTLTISSLQAEDVAVYYCQQHYSVPFTFGPGTKVDIKSGGGGSEVQLLESGGGLVQPGGSLKLSCAASGFTFNRYAMNWVRQAPGKGLEWVARIRSKYNNYATYYADSVKGRFTISRDDSKNTAYLQMNNLKTEDTAVYYCVRHGNFGNSYLSYFAYWGQGTLVTVSSGGGGSGGGGSGGGGSELVVTQEPSLTVSPGGTVTLTCGSSTGAVTSGYYPNWVQQKPGQAPRGLIGGTKFLAPGTPARFSGSLLGGKAALTLSGVQPEDEAEYYCALWYSNRWVFGGGTKLTVL

SEQ ID NO: 228 - DNA, 1500 bp, Artificial Sequence
  MCSP-F9 VH-VL-P x G4H VH-VL-P
gaggtgcagctgcaagagtctggcccaggactggtgaagccttcggagaccctgtccctcacctgcgttgtctctggtggctccatcagcagtagtaactggtggagctgggtccgccagcccccagggaagggactggagtggcttgggactatctattataatgggaatacctactacaacccgtccctcaagagtcgagtcaccatctccgtagacacgtccaagaaccagttctccctgaggctgagctctgtgaccgccgcagacacggccgtgtattactgtgcgaaatcctgggtctcctggtttgcttcctggggtcaaggaaccttggtcaccgtctcctcaggtggtggtggttctggcggcggcggctccggtggtggtggttctgagctcgtgatgacacagtctccagactccctggctgtgtctctgggcgagagggccaccatcaactgcaagtccagccagagtgtcttatccagctccaacaataagaactacttaaattggtaccagcagaaaccaggacagcctcctaagttgctcatttactgggcatctacccgggaatccggggtccctgaccgattcagtggcagcgggtctgggacagatttcactctcaccatcagcagcctgcaggctgaagatgtggcagtttattactgtcagcaacattatagtgttccattcactttcggccctgggaccaaagtggatatcaaatccggaggtggtggatccgaggtgcagctgctcgagtctggaggaggattggtgcagcctggagggtcattgaaactctcatgtgcagcctctggattcaccttcaatcgctacgccatgaactgggtccgccaggctccaggaaagggtttggaatgggttgctcgcataagaagtaaatataataattatgcaacatattatgccgattcagtgaaagggaggttcaccatctccagagatgattcaaaaaacactgcctatctacaaatgaacaacttgaaaactgaggacactgccgtgtactactgtgtgagacatgggaacttcggtaatagctacttatcctacttcgcttactggggccaagggactctggtcaccgtctcctcaggtggtggtggttctggcggcggcggctccggtggtggtggttctgagctcgttgtgactcaggaaccttcactcaccgtatcacctggtggaacagtcacactcacttgtggctcctcgactggggctgttacatctggctactacccaaactgggtccaacaaaaaccaggtcaggcaccccgtggtctaataggtgggactaagttcctcgcccccggtactcctgccagattctcaggctccctgcttggaggcaaggctgccctcaccctctcaggggtacagccagaggatgaggcagaatattactgtgctctatggtacagcaaccgctgggtgttcggtggaggaaccaaactgactgtccta

SEQ ID NO: 229 - protein, 267 aa, Artificial Sequence
  1-27 CD3 epsilon-Fc
QDGNEEMGGITQTPYKVSISGTTVILTSGEPKSCDKTHTCPPCPAPELLGGPSVFLFPPKPKDTLMISRTPEVTCVVVDVSHEDPEVKFNWYVDGVEVHNAKTKPREEQYNSTYRVVSVLTVLHQDWLNGKEYKCKVSNKALPAPIEKTISKAKGQPREPQVYTLPPSREEMTKNQVSLTCLVKGFYPSDIAVEWESNGQPENNYKTTPPVLDSDGSFFLYSKLTVDKSRWQQGNVFSCSVMHEALHNHYTQKSLSLSPGKHHHHHH

SEQ ID NO: 230 - DNA, 858 bp, Artificial Sequence
  1-27 CD3 epsilon-Fc
atgggatggagctgtatcatcctcttcttggtagcaacagctacaggtgtacactcccaagatggtaatgaagaaatgggtggtattacacagacaccatataaagtctccatctctggaaccacagtaatattgacatccggagagcccaaatcttgtgacaaaactcacacatgcccaccgtgcccagcacctgaactcctggggggaccgtcagtcttcctcttccccccaaaacccaaggacaccctcatgatctcccggacccctgaggtcacatgcgtggtggtggacgtgagccacgaagaccctgaggtcaagttcaactggtacgtggacggcgtggaggtgcataatgccaagacaaagccgcgggaggagcagtacaacagcacgtaccgtgtggtcagcgtcctcaccgtcctgcaccaggactggctgaatggcaaggagtacaagtgcaaggtctccaacaaagccctcccagcccccatcgagaaaaccatctccaaagccaaagggcagccccgagaaccacaggtgtacaccctgcccccatcccgggaggagatgaccaagaaccaggtcagcctgacctgcctggtcaaaggcttctatcccagcgacatcgccgtggagtgggagagcaatgggcagccggagaacaactacaagaccacgcctcccgtgctggactccgacggctccttcttcctctatagcaagctcaccgtggacaagagcaggtggcagcaggggaacgtcttctcatgctccgtgatgcatgaggctctgcacaaccactacacgcagaagagcctctccctgtccccgggtaaacatcatcaccatcatcat

SEQ ID NO: 231 - protein, 333 aa, Artificial Sequence
  human 1-27 CD3 epsilon-EpCAM
QDGNEEMGGITQTPYKVSISGTTVILTDYKDDDDKTASFAAAQKECVCENYKLAVNCFLNDNGQCQCTSIGAQNTVLCSKLAAKCLVMKAEMNGSKLGRRAKPEGALQNNDGLYDPDCDESGLFKAKQCNGTSTCWCVNTAGVRRTDKDTEITCSERVRTYWIIIELKHKAREKPYDVQSLRTALEEAIKTRYQLDPKFITNILYEDNVITIDLVQNSSQKTQNDVDIADVAYYFEKDVKGESLFHSKKMDLRVNGEQLDLDPGQTLIYYVDEKAPEFSMQGLKAGVIAVIVVVVIAIVAGIVVLVISRKKRMAKYEKAEIKEMGEMHRELNA

SEQ ID NO: 232 - DNA, 1056 bp, Artificial Sequence
  human 1-27 CD3 epsilon-EpCAM
atgggatggagctgtatcatcctcttcttggtagcaacagctacaggtgtacactcccaagatggtaatgaagaaatgggtggtattacacagacaccatataaagtctccatctctggaaccacagtaatattgacagattacaaggacgacgatgacaagactgcgagttttgccgcagctcagaaagaatgtgtctgtgaaaactacaagctggccgtaaactgctttttgaatgacaatggtcaatgccagtgtacttcgattggtgcacaaaatactgtcctttgctcaaagctggctgccaaatgtttggtgatgaaggcagaaatgaacggctcaaaacttgggagaagagcgaaacctgaaggggctctccagaacaatgatggcctttacgatcctgactgcgatgagagcgggctctttaaggccaagcagtgcaacggcacctccacgtgctggtgtgtgaacactgctggggtcagaagaactgacaaggacactgaaataacctgctctgagcgagtgagaacctactggatcatcattgaattaaaacacaaagcaagagaaaaaccttatgatgttcaaagtttgcggactgcacttgaggaggcgatcaaaacgcgttatcaactggatccaaaatttatcacaaatattttgtatgaggataatgttatcactattgatctggttcaaaattcttctcagaaaactcagaatgatgtggacatagctgatgtggcttattattttgaaaaagatgttaaaggtgaatccttgtttcattctaagaaaatggacctgagagtaaatggggaacaactggatctggatcctggtcaaactttaatttattatgtcgatgaaaaagcacctgaattctcaatgcagggtctaaaagctggtgttattgctgttattgtggttgtggtgatagcaattgttgctggaattgttgtgctggttatttccagaaagaagagaatggcaaagtatgagaaggctgagataaaggagatgggtgagatgcatagggaactcaatgca

SEQ ID NO: 233 - protein, 333 aa, Artificial Sequence
  marmoset 1-27 CD3 epsilon-EpCAM
QDGNEEMGDTTQNPYKVSISGTTVTLTDYKDDDDKTASFAAAQKECVCENYKLAVNCFLNDNGQCQCTSIGAQNTVLCSKLAAKCLVMKAEMNGSKLGRRAKPEGALQNNDGLYDPDCDESGLFKAKQCNGTSTCWCVNTAGVRRTDKDTEITCSERVRTYWIIIELKHKAREKPYDVQSLRTALEEAIKTRYQLDPKFITNILYEDNVITIDLVQNSSQKTQNDVDIADVAYYFEKDVKGESLFHSKKMDLRVNGEQLDLDPGQTLIYYVDEKAPEFSMQGLKAGVIAVIVVVVIAIVAGIVVLVISRKKRMAKYEKAEIKEMGEMHRELNA

SEQ ID NO: 234 - DNA, 1056 bp, Artificial Sequence
  marmoset 1-27 CD3 epsilon-EpCAM
atgggatggagctgtatcatcctcttcttggtagcaacagctacaggtgtacactcccaggacggtaatgaagaaatgggtgatactacacagaacccatataaagtttccatctcaggaaccacagtaacactgacagattacaaggacgacgatgacaagactgcgagttttgccgcagctcagaaagaatgtgtctgtgaaaactacaagctggccgtaaactgctttttgaatgacaatggtcaatgccagtgtacttcgattggtgcacaaaatactgtcctttgctcaaagctggctgccaaatgtttggtgatgaaggcagaaatgaacggctcaaaacttgggagaagagcgaaacctgaaggggctctccagaacaatgatggcctttacgatcctgactgcgatgagagcgggctctttaaggccaagcagtgcaacggcacctccacgtgctggtgtgtgaacactgctggggtcagaagaactgacaaggacactgaaataacctgctctgagcgagtgagaacctactggatcatcattgaattaaaacacaaagcaagagaaaaaccttatgatgttcaaagtttgcggactgcacttgaggaggcgatcaaaacgcgttatcaactggatccaaaatttatcacaaatattttgtatgaggataatgttatcactattgatctggttcaaaattcttctcagaaaactcagaatgatgtggacatagctgatgtggcttattattttgaaaaagatgttaaaggtgaatccttgtttcattctaagaaaatggacctgagagtaaatggggaacaactggatctggatcctggtcaaactttaatttattatgtcgatgaaaaagcacctgaattctcaatgcagggtctaaaagctggtgttattgctgttattgtggttgtggtgatagcaattgttgctggaattgttgtgctggttatttccagaaagaagagaatggcaaagtatgagaaggctgagataaaggagatgggtgagatgcatagggaactcaatgca

SEQ ID NO: 235 - protein, 333 aa, Artificial Sequence; identical to SEQ ID NO: 233
  tamarin 1-27 CD3 epsilon-EpCAM

SEQ ID NO: 236 - DNA, 1056 bp, Artificial Sequence; identical to SEQ ID NO: 234
  tamarin 1-27 CD3 epsilon-EpCAM

SEQ ID NO: 237 - protein, 333 aa, Artificial Sequence
  squirrel monkey 1-27 CD3 epsilon-EpCAM
QDGNEEIGDTTQNPYKVSISGTTVTLTDYKDDDDKTASFAAAQKECVCENYKLAVNCFLNDNGQCQCTSIGAQNTVLCSKLAAKCLVMKAEMNGSKLGRRAKPEGALQNNDGLYDPDCDESGLFKAKQCNGTSTCWCVNTAGVRRTDKDTEITCSERVRTYWIIIELKHKAREKPYDVQSLRTALEEAIKTRYQLDPKFITNILYEDNVITIDLVQNSSQKTQNDVDIADVAYYFEKDVKGESLFHSKKMDLRVNGEQLDLDPGQTLIYYVDEKAPEFSMQGLKAGVIAVIVVVVIAIVAGIVVLVISRKKRMAKYEKAEIKEMGEMHRELNA

SEQ ID NO: 238 - DNA, 1056 bp, Artificial Sequence
  squirrel monkey 1-27 CD3 epsilon-EpCAM
atgggatggagctgtatcatcctcttcttggtagcaacagctacaggtgtacactcccaggacggtaatgaagagattggtgatactacccagaacccatataaagtttccatctcaggaaccacagtaacactgacagattacaaggacgacgatgacaagactgcgagttttgccgcagctcagaaagaatgtgtctgtgaaaactacaagctggccgtaaactgctttttgaatgacaatggtcaatgccagtgtacttcgattggtgcacaaaatactgtcctttgctcaaagctggctgccaaatgtttggtgatgaaggcagaaatgaacggctcaaaacttgggagaagagcgaaacctgaaggggctctccagaacaatgatggcctttacgatcctgactgcgatgagagcgggctctttaaggccaagcagtgcaacggcacctccacgtgctggtgtgtgaacactgctggggtcagaagaactgacaaggacactgaaataacctgctctgagcgagtgagaacctactggatcatcattgaattaaaacacaaagcaagagaaaaaccttatgatgttcaaagtttgcggactgcacttgaggaggcgatcaaaacgcgttatcaactggatccaaaatttatcacaaatattttgtatgaggataatgttatcactattgatctggttcaaaattcttctcagaaaactcagaatgatgtggacatagctgatgtggcttattattttgaaaaagatgttaaaggtgaatccttgtttcattctaagaaaatggacctgagagtaaatggggaacaactggatctggatcctggtcaaactttaatttattatgtcgatgaaaaagcacctgaattctcaatgcagggtctaaaagctggtgttattgctgttattgtggttgtggtgatagcaattgttgctggaattgttgtgctggttatttccagaaagaagagaatggcaaagtatgagaaggctgagataaaggagatgggtgagatgcatagggaactcaatgca

SEQ ID NO: 239 - protein, 333 aa, Artificial Sequence
  swine 1-27 CD3 epsilon-EpCAM
QEDIERPDEDTQKTFKVSISGDKVELTDYKDDDDKTASFAAAQKECVCENYKLAVNCFLNDNGQCQCTSIGAQNTVLCSKLAAKCLVMKAEMNGSKLGRRAKPEGALQNNDGLYDPDCDESGLFKAKQCNGTSTCWCVNTAGVRRTDKDTEITCSERVRTYWIIIELKHKAREKPYDVQSLRTALEEAIKTRYQLDPKFITNILYEDNVITIDLVQNSSQKTQNDVDIADVAYYFEKDVKGESLFHSKKMDLRVNGEQLDLDPGQTLIYYVDEKAPEFSMQGLKAGVIAVIVVVVIAIVAGIVVLVISRKKRMAKYEKAEIKEMGEMHRELNA

SEQ ID NO: 240 - DNA, 1056 bp, Artificial Sequence
  swine 1-27 CD3 epsilon-EpCAM
atgggatggagctgtatcatcctcttcttggtagcaacagctacaggtgtacactcccaagaagacattgaaagaccagatgaagatacacagaaaacatttaaagtctccatctctggagacaaagtagagctgacagattacaaggacgacgatgacaagactgcgagttttgccgcagctcagaaagaatgtgtctgtgaaaactacaagctggccgtaaactgctttttgaatgacaatggtcaatgccagtgtacttcgattggtgcacaaaatactgtcctttgctcaaagctggctgccaaatgtttggtgatgaaggcagaaatgaacggctcaaaacttgggagaagagcgaaacctgaaggggctctccagaacaatgatggcctttacgatcctgactgcgatgagagcgggctctttaaggccaagcagtgcaacggcacctccacgtgctggtgtgtgaacactgctggggtcagaagaactgacaaggacactgaaataacctgctctgagcgagtgagaacctactggatcatcattgaattaaaacacaaagcaagagaaaaaccttatgatgttcaaagtttgcggactgcacttgaggaggcgatcaaaacgcgttatcaactggatccaaaatttatcacaaatattttgtatgaggataatgttatcactattgatctggttcaaaattcttctcagaaaactcagaatgatgtggacatagctgatgtggcttattattttgaaaaagatgttaaaggtgaatccttgtttcattctaagaaaatggacctgagagtaaatggggaacaactggatctggatcctggtcaaactttaatttattatgtcgatgaaaaagcacctgaattctcaatgcagggtctaaaagctggtgttattgctgttattgtggttgtggtgatagcaattgttgctggaattgttgtgctggttatttccagaaagaagagaatggcaaagtatgagaaggctgagataaaggagatgggtgagatgcatagggaactcaatgca

SEQ ID NO: 241 - protein, 186 aa, Homo sapiens
QDGNEEMGGITQTPYKVSISGTTVILTCPQYPGSEILWQHNDKNIGGDEDDKNIGSDEDHLSLKEFSELEQSGYYVCYPRGSKPEDANFYLYLRARVCENCMEMDVMSVATIVIVDICITGGLLLLVYYWSKNRKAKAKPVTRGAGAGGRQRGQNKERPPPVPNPDYEPIRKGQRDLYSGLNQRRI

SEQ ID NO: 242 - DNA, 621 bp, Homo sapiens
atgcagtcgggcactcactggagagttctgggcctctgcctcttatcagttggcgtttgggggcaagatggtaatgaagaaatgggtggtattacacagacaccatataaagtctccatctctggaaccacagtaatattgacatgccctcagtatcctggatctgaaatactatggcaacacaatgataaaaacataggcggtgatgaggatgataaaaacataggcagtgatgaggatcacctgtcactgaaggaattttcagaattggagcaaagtggttattatgtctgctaccccagaggaagcaaaccagaagatgcgaacttttatctctacctgagggcacgcgtgtgtgagaactgcatggagatggatgtgatgtcggtggccacaattgtcatagtggacatctgcatcactgggggcttgctgctgctggtttactactggagcaagaatagaaaggccaaggccaagcctgtgacacgaggagcgggtgctggcggcaggcaaaggggacaaaacaaggagaggccaccacctgttcccaacccagactatgagcccatccggaaaggccagcgggacctgtattctggcctgaatcagagacgcatc

SEQ ID NO: 243 - protein, 19 aa, Artificial Sequence
  19 amino acid immunoglobulin leader peptide
MGWSCIILFLVATATGVHS

SEQ ID NO: 244 - DNA, 57 bp, Artificial Sequence
  19 amino acid immunoglobulin leader peptide coding sequence
atgggatggagctgtatcatcctcttcttggtagcaacagctacaggtgtacactcc

SEQ ID NO: 245 - protein, 324 aa, Mus sp.
AKTTPPSVYPLAPGSAAQTNSMVTLGCLVKGYFPEPVTVTWNSGSLSSGVHTFPAVLQSDLYTLSSSVTVPSSTWPSETVTCNVAHPASSTKVDKKIVPRDCGCKPCICTVPEVSSVFIFPPKPKDVLTITLTPKVTCVVVDISKDDPEVQFSWFVDDVEVHTAQTQPREEQFNSTFRSVSELPIMHQDWLNGKEFKCRVNSAAFPAPIEKTISKTKGRPKAPQVYTIPPPKEQMAKDKVSLTCMITDFFPEDITVEWQWNGQPAENYKNTQPIMDTDGSYFVYSKLNVQKSNWEAGNTFTCSVLHEGLHNHHTEKSLSHSPGK

SEQ ID NO: 246 - DNA, 972 bp, Mus sp.
gccaaaacgacacccccatctgtctatccactggcccctggatctgctgcccaaactaactccatggtgaccctgggatgcctggtcaagggctatttccctgagccagtgacagtgacctggaactctggatccctgtccagcggtgtgcacaccttcccagctgtcctgcagtctgacctctacactctgagcagctcagtgactgtcccctccagcacctggcccagcgagaccgtcacctgcaacgttgcccacccggccagcagcaccaaggtggacaagaaaattgtgcccagggattgtggttgtaagccttgcatatgtacagtcccagaagtatcatctgtcttcatcttccccccaaagcccaaggatgtgctcaccattactctgactcctaaggtcacgtgtgttgtggtagacatcagcaaggatgatcccgaggtccagttcagctggtttgtagatgatgtggaggtgcacacagctcagacgcaaccccgggaggagcagttcaacagcactttccgctcagtcagtgaacttcccatcatgcaccaggactggctcaatggcaaggagttcaaatgcagggtcaacagtgcagctttccctgcccccatcgagaaaaccatctccaaaaccaaaggcagaccgaaggctccacaggtgtacaccattccacctcccaaggagcagatggccaaggataaagtcagtctgacctgcatgataacagacttcttccctgaagacattactgtggagtggcagtggaatgggcagccagcggagaactacaagaacactcagcccatcatggacacagatggctcttacttcgtctacagcaagctcaatgtgcagaagagcaactgggaggcaggaaatactttcacctgctctgtgttacatgagggcctgcacaaccaccatactgagaagagcctctcccactctcctggtaaa

SEQ ID NO: 247 - protein, 106 aa, Homo sapiens
GQPKAAPSVTLFPPSSEELQANKATLVCLISDFYPGAVTVAWKADSSPVKAGVETTTPSKQSNNKYAASSYLSLTPEQWKSHKSYSCQVTHEGSTVEKTVAPTECS

SEQ ID NO: 248 - DNA, 318 bp, Homo sapiens
ggtcagcccaaggctgccccctcggtcactctgttcccaccctcctctgaggagcttcaagccaacaaggccacactggtgtgtctcataagtgacttctacccgggagccgtgacagtggcctggaaggcagatagcagccccgtcaaggcgggagtggagaccaccacaccctccaaacaaagcaacaacaagtacgcggccagcagctacctgagcctgacgcctgagcagtggaagtcccacaaaagctacagctgccaggtcacgcatgaagggagcaccgtggagaagacagtggcccctacagaatgttca

SEQ ID NO: 249 - protein, 800 aa, Homo sapiens
DYKDDDDKSRTRSGSQLDGGLVLFSHRGTLDGGFRFRLSDGEHTSPGHFFRVTAQKQVLLSLKGSQTLTVCPGSVQPLSSQTLRASSSAGTDPQLLLYRVVRGPQLGRLFHAQQDSTGEALVNFTQAEVYAGNILYEHEMPPEPFWEAHDTLELQLSSPPARDVAATLAVAVSFEAACPQRPSHLWKNKGLWVPEGQRARITVAALDASNLLASVPSPQRSEHDVLFQVTQFPSRGQLLVSEEPLHAGQPHFLQSQLAAGQLVYAHGGGGTQQDGFHFRAHLQGPAGASVAGPQTSEAFAITVRDVNERPPQPQASVPLRLTRGSRAPISRAQLSVVDPDSAPGEIEYEVQRAPHNGFLSLVGGGLGPVTRFTQADVDSGRLAFVANGSSVAGIFQLSMSDGASPPLPMSLAVDILPSAIEVQLRAPLEVPQALGRSSLSQQQLRVVSDREEPEAAYRLIQGPQYGHLLVGGRPTSAFSQFQIDQGEVVFAFTNSSSSHDHFRVLALARGVNASAVVNVTVRALLHVWAGGPWPQGATLRLDPTVLDAGELANRTDSVPRFRLLEGPRHGRVVRVPRARTEPGGSQLVEQFTQQDLEDGRLGLEVGRPEGRAPGPAGDSLTLELWAQGVPPAVASLDFATEPYNAARPYSVALLSVPEAARTEAGKPESSTPTGEPGPMASSPEPAVAKGGFLSFLEANMFSVIIPMCLVLLLLALILPLLFYLRKRNKTGKHDVQVLTAKPRNGLAGDTETFRKVEPGQAIPLTAVPGQGPPPGGQPDPELLQFCRTPNPALKNGQYWV

SEQ ID NO: 250 - DNA, 2457 bp, Homo sapiens
atgggatggagctgtatcatcctcttcttggtagcaacagctacaggtgtacactccgactacaaagacgatgacgacaagtcccgtacgagatctggatcccaattggacggcgggctcgtgctgttctcacacagaggaaccctggatggaggcttccgcttccgcctctctgacggcgagcacacttcccccggacacttcttccgagtgacggcccagaagcaagtgctcctctcgctgaagggcagccagacactgactgtctgcccagggtccgtccagccactcagcagtcagaccctcagggccagctccagcgcaggcactgacccccagctcctgctctaccgtgtggtgcggggcccccagctaggccggctgttccacgcccagcaggacagcacaggggaggccctggtgaacttcactcaggcagaggtctacgctgggaatattctgtatgagcatgagatgccccccgagcccttttgggaggcccatgataccctagagctccagctgtcctcgccgcctgcccgggacgtggccgccacccttgctgtggctgtgtcttttgaggctgcctgtccccagcgccccagccacctctggaagaacaaaggtctctgggtccccgagggccagcgggccaggatcaccgtggctgctctggatgcctccaatctcttggccagcgttccatcaccccagcgctcagagcatgatgtgctcttccaggtcacacagttccccagccgcggccagctgttggtgtccgaggagcccctccatgctgggcagccccacttcctgcagtcccagctggctgcagggcagctagtgtatgcccacggcggtgggggcacccagcaggatggcttccactttcgtgcccacctccaggggccagcaggggcctccgtggctggaccccaaacctcagaggcctttgccatcacggtgagggatgtaaatgagcggccccctcagccacaggcctctgtcccactccggctcacccgaggctctcgtgcccccatctcccgggcccagctgagtgtggtggacccagactcagctcctggggagattgagtacgaggtccagcgggcaccccacaacggcttcctcagcctggtgggtggtggcctggggcccgtgacccgcttcacgcaagccgatgtggattcagggcggctggccttcgtggccaacgggagcagcgtggcaggcatcttccagctgagcatgtctgatggggccagcccacccctgcccatgtccctggctgtggacatcctaccatccgccatcgaggtgcagctgcgggcacccctggaggtgccccaagctttggggcgctcctcactgagccagcagcagctccgggtggtttcagatcgggaggagccagaggcagcataccggttgatccagggaccccagtatgggcatctcctggtgggcgggcggcccacctcggccttcagccaattccagatagaccagggcgaggtggtctttgccttcaccaactcctcctcctctcatgaccacttcagagtcctggcactggctaggggtgtcaatgcatcagccgtagtgaacgtcactgtgagggctctgctgcatgtgtgggcaggtgggccatggccccagggtgccaccctgcgcctggaccccaccgtcctagatgctggcgagctggccaaccgcacagacagtgtgccgcgcttccgcctcctggagggaccccggcatggccgcgtggtccgcgtgccccgagccaggacggagcccgggggcagccagctggtggagcagttcactcagcaggaccttgaggacgggaggctggggctggaggtgggcaggccagaggggagggcccccggccccgcaggtgacagtctcactctggagctgtgggcacagggcgtcccgcctgctgtggcctccctggactttgccactgagccttacaatgctgcccggccctacagcgtggccctgctcagtgtccccgaggccgcccggacggaagcagggaagccagagagcagcacccccacaggcgagccaggccccatggcatccagccctgagcccgctgtggccaagggaggcttcctgagctttctagaggccaacatgttcagcgtcatcatccccatgtgcctggtacttctgctcctggcgctcatcctgcccctgctcttctacctccgaaaacgcaacaagacgggcaagcatgacgtccaggtcctgactgccaagccccgcaacggcctggctggtgacaccgagacctttcgcaaggtggagccaggccaggccatcccgctcacagctgtgcctggccaggggccccctccaggaggccagcctgacccagagctgctgcagttctgccggacacccaaccctgcccttaagaatggccagtactgggtg

SEQ ID NO: 251 - protein, 807 aa, Macaca fascicularis
  misc_feature (714)..(714): Xaa can be any naturally occurring amino acid
PSNGRVVLRAAPGTEVRSFTQAQLDGGLVLFSHRGTLDGGFRFGLSDGEHTSSGHFFRVTAQKQVLLSLEGSRTLTVCPGSVQPLSSQTLRASSSAGTDPQLLLYRVVRGPQLGRLFHAQQDSTGEALVNFTQAEVYAGNILYEHEMPTEPFWEAHDTLELQLSSPPARDVAATLAVAVSFEAACPQRPSHLWKNKGLWVPEGQRAKITMAALDASNLLASVPSSQRLEHDVLFQVTQFPSRGQLLVSEEPLHAGQPHFLQSQLAAGQLVYAHGGGGTQQDGFHFRAHLQGPAGATVAGPQTSEAFAITVRDVNERPPQPQASVPLRITRGSRAPISRAQLSVVDPDSAPGEIEYEVQRAPHNGFLSLVGGGPGPVNRFTQADVDSGRLAFVANGSSVAGVFQLSMSDGASPPLPMSLAVDILPSAIEVQLQAPLEVPQALGRSSLSQQQLRVVSDREEPEAAYRLIQGPKYGHLLVGGQPASAFSQLQIDQGEVVFAFTNFSSSHDHFRVLALARGVNASAVVNITVRALLHVWAGGPWPQGATLRLDPTILDAGELANRTGSVPRFRLLEGPRHGRVVRVPRARMEPGGSQLVEQFTQQDLEDGRLGLEVGRPEGRAPSPTGDSLTLELWAQGVPPAVASLDFATEPYNAARPYSVALLSVPEATRTEAGKPESSTPTGEPGPMASSPVPAVAKGGFLGFLEANMFSVIIPXCLVLLLLALILPLLFYLRKRNKTGKHDVQVLTAKPRNGLAGDTETFRKVEPGQAIPLTAVPGQGPPPGGQPDPELLQFCRTPNPALKNGQYWV

SEQ ID NO: 252 - DNA, 2421 bp, Macaca fascicularis
cccagcaacggacgggtagtgctgcgggcggcgccgggcaccgaggtgcgcagcttcacgcaggcccagctggatggcggactcgtgctgttctcacacagaggaaccctggatggaggcttccgcttcggcctctccgatggcgagcacacttcctctggacacttcttccgagtgacggcccagaagcaagtgctcctctcgctggagggcagccggacactgactgtctgcccagggtccgtgcagccactcagcagtcagaccctcagagccagctccagcgcaggcaccgacccccagctcctgctctaccgtgtggtgcggggcccccagctaggccggctgttccatgcccagcaggacagcacaggggaggccctggtgaacttcactcaggcagaggtctatgctgggaatattctgtatgagcatgagatgcccaccgagcccttctgggaggcccatgataccctagagctccagctgtcctcaccacctgcccgggacgtggctgccacccttgctgtggctgtgtcttttgaggctgcctgtccccagcgccccagccacctctggaagaacaaaggtctctgggtccccgagggccagcgggccaagatcaccatggctgccctggatgcctccaacctcttggccagcgttccatcatcccagcgcctagagcatgatgtgctcttccaggtcacgcagttccccagccggggccagctattggtgtctgaggagcccctccacgctgggcagccccacttcctgcagtcccagctggctgcagggcagctagtgtatgcccacggcggtgggggtacccaacaggatggcttccactttcgtgcccacctccaggggccagcaggggccaccgtggctggaccccaaacctcagaggcttttgccatcacggtgcgggatgtaaatgagcggccccctcagccacaggcctctgtcccactccggatcacccgaggctctcgagcccccatctcccgggcccagctgagtgtcgtggacccagactcagctcctggggagattgagtatgaggtccagcgggcaccccacaacggcttcctcagcctggtgggtggtggcccggggcccgtgaaccgcttcacgcaagccgatgtggattcggggcggctggccttcgtggccaacgggagcagcgtagcaggcgtcttccagctgagcatgtctgatggggccagcccaccgctgcccatgtccctggccgtggacatcctaccatccgccatcgaggtgcagctgcaggcacccctggaggtgccccaagctttggggcgctcctcactgagccagcagcagctccgggtggtttcagatagggaggagccagaggcagcataccgcctcatccagggaccaaagtacgggcatctcctggtgggtgggcagcccgcctcggccttcagccaactccagatagaccagggcgaggtggtctttgccttcaccaacttctcctcctctcatgaccacttcagagtcctggcactggctaggggtgtcaacgcatcagccgtagtgaacatcactgtgagggctctgctgcacgtgtgggcaggtgggccatggccccagggtgctaccctgcgcctggacccaaccatcctagatgctggcgagctggccaaccgcacaggcagtgtgccccgcttccgcctcctggagggaccccggcatggccgcgtggtccgtgtgccccgagccaggatggagcctgggggcagccagctggtggagcagttcactcagcaggaccttgaggatgggaggctggggctggaggtgggcaggccagagggaagggcccccagccccacaggcgacagtctcactctggagctgtgggcacagggcgtcccacctgctgtggcctccctggactttgccactgagccttacaatgctgcccggccctacagcgtggccctgctcagtgtccccgaggccacccggacggaagcagggaagccagagagcagcacccccacaggcgagccaggccccatggcatctagccctgtgcctgctgtggccaagggaggcttcctgggcttccttgaggccaacatgttcagtgtcatcatccccrtgtgcctggtccttctgctcctggcgctcatcttgcccctgctcttctacctccgaaaacgcaacaagacgggcaagcatgacgtccaggtcctgactgccaagccccgcaatggtctggctggtgacactgagacctttcgcaaggtggagccaggccaggccatcccgctcacagctgtgcctggccaggggccccctccgggaggccagcctgacccagagctgctgcagttctgccggacacccaaccctgcccttaagaatggccagtactgggtg

SEQ ID NO: 253 - DNA, 18 bp, Artificial Sequence
  PCR primer for CD3 epsilon chain - forward primer
agagttctgggcctctgc

SEQ ID NO: 254 - DNA, 19 bp, Artificial Sequence
  PCR primer for CD3 epsilon chain - reverse primer
cggatgggctcatagtctg

SEQ ID NO: 255 - protein, 192 aa, Artificial Sequence
  His6-human CD3 epsilon
HHHHHHQDGNEEMGGITQTPYKVSISGTTVILTCPQYPGSEILWQHNDKNIGGDEDDKNIGSDEDHLSLKEFSELEQSGYYVCYPRGSKPEDANFYLYLRARVCENCMEMDVMSVATIVIVDICITGGLLLLVYYWSKNRKAKAKPVTRGAGAGGRQRGQNKERPPPVPNPDYEPIRKGQRDLYSGLNQRRI

SEQ ID NO: 256 - DNA, 633 bp, Artificial Sequence
  His6-human CD3 epsilon
atgggatggagctgtatcatcctcttcttggtagcaacagctacaggtgtacactcccatcatcaccatcatcatcaagatggtaatgaagaaatgggtggtattacacagacaccatataaagtctccatctctggaaccacagtaatattgacatgccctcagtatcctggatctgaaatactatggcaacacaatgataaaaacataggcggtgatgaggatgataaaaacataggcagtgatgaggatcacctgtcactgaaggaattttcagaattggagcaaagtggttattatgtctgctaccccagaggaagcaaaccagaagatgcgaacttttatctctacctgagggcacgcgtgtgtgagaactgcatggagatggatgtgatgtcggtggccacaattgtcatagtggacatctgcatcactgggggcttgctgctgctggtttactactggagcaagaatagaaaggccaaggccaagcctgtgacacgaggagcgggtgctggcggcaggcaaaggggacaaaacaaggagaggccaccacctgttcccaacccagactatgagcccatccggaaaggccagcgggacctgtattctggcctgaatcagagacgcatc

SEQ ID NO: 257 - protein, 505 aa, Artificial Sequence
  CD33 AH3 HL x H2C HL
QVQLVQSGAEVKKPGESVKVSCKASGYTFTNYGMNWVRQAPGQGLEWMGWINTYTGEPTYADDFKGRVTMSSDTSTSTAYLEINSLRSDDTAIYYCARWSWSDGYYVYFDYWGQGTTVTVSSGGGGSGGGGSGGGGSDIVMTQSPDSLTVSLGERTTINCKSSQSVLDSSKNKNSLAWYQQKPGQPPKLLLSWASTRESGIPDRFSGSGSGTDFTLTIDSLQPEDSATYYCQQSAHFPITFGQGTRLEIKSGGGGSEVQLVESGGGLVQPGGSLKLSCAASGFTFNKYAMNWVRQAPGKGLEWVARIRSKYNNYATYYADSVKDRFTISRDDSKNTAYLQMNNLKTEDTAVYYCVRHGNFGNSYISYWAYWGQGTLVTVSSGGGGSGGGGSGGGGSQTVVTQEPSLTVSPGGTVTLTCGSSTGAVTSGYYPNWVQQKPGQAPRGLIGGTKFLAPGTPARFSGSLLGGKAALTLSGVQPEDEAEYYCALWYSNRWVFGGGTKLTVL

SEQ ID NO: 258 - DNA, 1515 bp, Artificial Sequence
  CD33 AH3 HL x H2C HL
caggtgcagctggtgcagtctggagctgaggtgaaaaagcctggagagtcagtcaaggtctcctgcaaggctagcgggtataccttcacaaactatggaatgaactgggtgaggcaggctccaggacagggtttagagtggatgggctggataaacacctacactggagagccaacatatgctgatgacttcaagggacgggttaccatgtcttcggatacctctaccagcactgcctatttggaaatcaacagcctcagaagtgatgacacggctatatattactgtgcgcgctggagttggagtgatggttactacgtttactttgactactggggccaaggcactacggtcaccgtctcctcaggtggtggtggttctggcggcggcggctccggtggtggtggttctgacatcgtgatgacacagtctccagactccctgactgtgtctctgggcgagaggaccaccatcaactgcaagtccagccagagtgttttagacagctccaagaataagaactccttagcttggtaccagcagaaaccaggacagcctcctaaattactcctttcctgggcatctacgcgggaatccgggatccctgaccgattcagtggcagcgggtctgggacagatttcactctcactattgacagcctgcagcctgaagattctgcaacttactattgtcaacagtctgcccacttcccgatcacctttggccaagggacacgactggagattaaatccggaggtggtggctccgaggtgcagctggtcgagtctggaggaggattggtgcagcctggagggtcattgaaactctcatgtgcagcctctggattcaccttcaataagtacgccatgaactgggtccgccaggctccaggaaagggtttggaatgggttgctcgcataagaagtaaatataataattatgcaacatattatgccgattcagtgaaagacaggttcaccatctccagagatgattcaaaaaacactgcctatctacaaatgaacaacttgaaaactgaggacactgccgtgtactactgtgtgagacatgggaacttcggtaatagctacatatcctactgggcttactggggccaagggactctggtcaccgtctcctcaggtggtggtggttctggcggcggcggctccggtggtggtggttctcagactgttgtgactcaggaaccttcactcaccgtatcacctggtggaacagtcacactcacttgtggctcctcgactggggctgttacatctggctactacccaaactgggtccaacaaaaaccaggtcaggcaccccgtggtctaataggtgggactaagttcctcgcccccggtactcctgccagattctcaggctccctgcttggaggcaaggctgccctcaccctctcaggggtacagccagaggatgaggcagaatattactgtgctctatggtacagcaaccgctgggtgttcggtggaggaaccaaactgactgtccta

SEQ ID NO: 259 - protein, 505 aa, Artificial Sequence
  CD33 AH3 HL x F12Q HL
QVQLVQSGAEVKKPGESVKVSCKASGYTFTNYGMNWVRQAPGQGLEWMGWINTYTGEPTYADDFKGRVTMSSDTSTSTAYLEINSLRSDDTAIYYCARWSWSDGYYVYFDYWGQGTTVTVSSGGGGSGGGGSGGGGSDIVMTQSPDSLTVSLGERTTINCKSSQSVLDSSKNKNSLAWYQQKPGQPPKLLLSWASTRESGIPDRFSGSGSGTDFTLTIDSLQPEDSATYYCQQSAHFPITFGQGTRLEIKSGGGGSEVQLVESGGGLVQPGGSLKLSCAASGFTFNSYAMNWVRQAPGKGLEWVARIRSKYNNYATYYADSVKGRFTISRDDSKNTAYLQMNNLKTEDTAVYYCVRHGNFGNSYVSWWAYWGQGTLVTVSSGGGGSGGGGSGGGGSQTVVTQEPSLTVSPGGTVTLTCGSSTGAVTSGNYPNWVQQKPGQAPRGLIGGTKFLAPGTPARFSGSLLGGKAALTLSGVQPEDEAEYYCVLWYSNRWVFGGGTKLTVL

SEQ ID NO: 260 - DNA, 1515 bp, Artificial Sequence
  CD33 AH3 HL x F12Q HL
caggtgcagctggtgcagtctggagctgaggtgaaaaagcctggagagtcagtcaaggtctcctgcaaggctagcgggtataccttcacaaactatggaatgaactgggtgaggcaggctccaggacagggtttagagtggatgggctggataaacacctacactggagagccaacatatgctgatgacttcaagggacgggttaccatgtcttcggatacctctaccagcactgcctatttggaaatcaacagcctcagaagtgatgacacggctatatattactgtgcgcgctggagttggagtgatggttactacgtttactttgactactggggccaaggcactacggtcaccgtctcctcaggtggtggtggttctggcggcggcggctccggtggtggtggttctgacatcgtgatgacacagtctccagactccctgactgtgtctctgggcgagaggaccaccatcaactgcaagtccagccagagtgttttagacagctccaagaataagaactccttagcttggtaccagcagaaaccaggacagcctcctaaattactcctttcctgggcatctacgcgggaatccgggatccctgaccgattcagtggcagcgggtctgggacagatttcactctcactattgacagcctgcagcctgaagattctgcaacttactattgtcaacagtctgcccacttcccgatcacctttggccaagggacacgactggagattaaatccggaggtggtggctccgaggtgcagctggtcgagtctggaggaggattggtgcagcctggagggtcattgaaactctcatgtgcagcctctggattcaccttcaatagctacgccatgaactgggtccgccaggctccaggaaagggtttggaatgggttgctcgcataagaagtaaatataataattatgcaacatattatgccgattcagtgaaaggcaggttcaccatctccagagatgattcaaaaaacactgcctatctacaaatgaacaacttgaaaactgaggacactgccgtgtactactgtgtgagacatgggaacttcggtaatagctacgtttcctggtgggcttactggggccaagggactctggtcaccgtctcctcaggtggtggtggttctggcggcggcggctccggtggtggtggttctcagactgttgtgactcaggaaccttcactcaccgtatcacctggtggaacagtcacactcacttgtggctcctcgactggggctgttacatctggcaactacccaaactgggtccaacaaaaaccaggtcaggcaccccgtggtctaataggtgggactaagttcctcgcccccggtactcctgccagattctcaggctccctgcttggaggcaaggctgccctcaccctctcaggggtacagccagaggatgaggcagaatattactgtgttctatggtacagcaaccgctgggtgttcggtggaggaaccaaactgactgtccta

SEQ ID NO: 261 - protein, 505 aa, Artificial Sequence
  CD33 AH3 HL x I2C HL
QVQLVQSGAEVKKPGESVKVSCKASGYTFTNYGMNWVRQAPGQGLEWMGWINTYTGEPTYADDFKGRVTMSSDTSTSTAYLEINSLRSDDTAIYYCARWSWSDGYYVYFDYWGQGTTVTVSSGGGGSGGGGSGGGGSDIVMTQSPDSLTVSLGERTTINCKSSQSVLDSSKNKNSLAWYQQKPGQPPKLLLSWASTRESGIPDRFSGSGSGTDFTLTIDSLQPEDSATYYCQQSAHFPITFGQGTRLEIKSGGGGSEVQLVESGGGLVQPGGSLKLSCAASGFTFNKYAMNWVRQAPGKGLEWVARIRSKYNNYATYYADSVKDRFTISRDDSKNTAYLQMNNLKTEDTAVYYCVRHGNFGNSYISYWAYWGQGTLVTVSSGGGGSGGGGSGGGGSQTVVTQEPSLTVSPGGTVTLTCGSSTGAVTSGNYPNWVQQKPGQAPRGLIGGTKFLAPGTPARFSGSLLGGKAALTLSGVQPEDEAEYYCVLWYSNRWVFGGGTKLTVL

SEQ ID NO: 262 - DNA, 1515 bp, Artificial Sequence
  CD33 AH3 HL x I2C HL
caggtgcagctggtgcagtctggagctgaggtgaaaaagcctggagagtcagtcaaggtctcctgcaaggctagcgggtataccttcacaaactatggaatgaactgggtgaggcaggctccaggacagggtttagagtggatgggctggataaacacctacactggagagccaacatatgctgatgacttcaagggacgggttaccatgtcttcggatacctctaccagcactgcctatttggaaatcaacagcctcagaagtgatgacacggctatatattactgtgcgcgctggagttggagtgatggttactacgtttactttgactactggggccaaggcactacggtcaccgtctcctcaggtggtggtggttctggcggcggcggctccggtggtggtggttctgacatcgtgatgacacagtctccagactccctgactgtgtctctgggcgagaggaccaccatcaactgcaagtccagccagagtgttttagacagctccaagaataagaactccttagcttggtaccagcagaaaccaggacagcctcctaaattactcctttcctgggcatctacgcgggaatccgggatccctgaccgattcagtggcagcgggtctgggacagatttcactctcactattgacagcctgcagcctgaagattctgcaacttactattgtcaacagtctgcccacttcccgatcacctttggccaagggacacgactggagattaaatccggaggtggtggctccgaggtgcagctggtcgagtctggaggaggattggtgcagcctggagggtcattgaaactctcatgtgcagcctctggattcaccttcaataagtacgccatgaactgggtccgccaggctccaggaaagggtttggaatgggttgctcgcataagaagtaaatataataattatgcaacatattatgccgattcagtgaaagacaggttcaccatctccagagatgattcaaaaaacactgcctatctacaaatgaacaacttgaaaactgaggacactgccgtgtactactgtgtgagacatgggaacttcggtaatagctacatatcctactgggcttactggggccaagggactctggtcaccgtctcctcaggtggtggtggttctggcggcggcggctccggtggtggtggttctcagactgttgtgactcaggaaccttcactcaccgtatcacctggtggaacagtcacactcacttgtggctcctcgactggggctgttacatctggcaactacccaaactgggtccaacaaaaaccaggtcaggcaccccgtggtctaataggtgggactaagttcctcgcccccggtactcctgccagattctcaggctccctgcttggaggcaaggctgccctcaccctctcaggggtacagccagaggatgaggcagaatattactgtgttctatggtacagcaaccgctgggtgttcggtggaggaaccaaactgactgtccta

SEQ ID NO: 263 - protein, 505 aa, Artificial Sequence
  CD33 AF5 HL x H2C HL
QVQLVQSGAEVKKPGASVKVSCKASGYTFTNYGMNWVKQAPGQGLKWMGWINTYTGEPTYADDFKGRVTMTSDTSTSTAYLELHNLRSDDTAVYYCARWSWSDGYYVYFDYWGQGTTVTVSSGGGGSGGGGSGGGGSDIVMTQSPDSLTVSLGERTTINCKSSQSVLDSSKNKNSLAWYQQKPGQPPKLLLSWASTRESGIPDRFSGSGSGTDFTLTIDSLQPEDSATYYCQQSAHFPITFGQGTRLEIKSGGGGSEVQLVESGGGLVQPGGSLKLSCAASGFTFNKYAMNWVRQAPGKGLEWVARIRSKYNNYATYYADSVKDRFTISRDDSKNTAYLQMNNLKTEDTAVYYCVRHGNFGNSYISYWAYWGQGTLVTVSSGGGGSGGGGSGGGGSQTVVTQEPSLTVSPGGTVTLTCGSSTGAVTSGYYPNWVQQKPGQAPRGLIGGTKFLAPGTPARFSGSLLGGKAALTLSGVQPEDEAEYYCALWYSNRWVFGGGTKLTVL

SEQ ID NO: 264 - DNA, 1515 bp, Artificial Sequence
  CD33 AF5 HL x H2C HL
caggtgcagctggtgcagtctggagctgaggtgaagaagcctggagcgtcagtcaaggtctcctgcaaggctagcgggtataccttcacaaactatggaatgaactgggtgaagcaggctccaggacagggtttaaagtggatgggctggataaacacctacactggagagccaacatatgctgatgacttcaagggacgggttaccatgacttcggatacctctaccagcactgcctatttggaactccacaacctcagaagtgatgacacggctgtatattactgtgcgcgctggagttggagtgatggttactacgtttactttgactactggggccaaggcactacggtcaccgtctcctcaggtggtggtggttctggcggcggcggctccggtggtggtggttctgacatcgtgatgacacagtctccagactccctgactgtgtctctgggcgagaggaccaccatcaactgcaagtccagccagagtgttttagacagctccaagaataagaactccttagcttggtaccagcagaaaccaggacagcctcctaaattactcctttcctgggcatctacgcgggaatccgggatccctgaccgattcagtggcagcgggtctgggacagatttcactctcactattgacagcctgcagcctgaagattctgcaacttactattgtcaacagtctgcccacttcccgatcacctttggccaagggacacgactggagattaaatccggaggtggtggctccgaggtgcagctggtcgagtctggaggaggattggtgcagcctggagggtcattgaaactctcatgtgcagcctctggattcaccttcaataagtacgccatgaactgggtccgccaggctccaggaaagggtttggaatgggttgctcgcataagaagtaaatataataattatgcaacatattatgccgattcagtgaaagacaggttcaccatctccagagatgattcaaaaaacactgcctatctacaaatgaacaacttgaaaactgaggacactgccgtgtactactgtgtgagacatgggaacttcggtaatagctacatatcctactgggcttactggggccaagggactctggtcaccgtctcctcaggtggtggtggttctggcggcggcggctccggtggtggtggttctcagactgttgtgactcaggaaccttcactcaccgtatcacctggtggaacagtcacactcacttgtggctcctcgactggggctgttacatctggctactacccaaactgggtccaacaaaaaccaggtcaggcaccccgtggtctaataggtgggactaagttcctcgcccccggtactcctgccagattctcaggctccctgcttggaggcaaggctgccctcaccctctcaggggtacagccagaggatgaggcagaatattactgtgctctatggtacagcaaccgctgggtgttcggtggaggaaccaaactgactgtccta

SEQ ID NO: 265 - protein, 505 aa, Artificial Sequence
  CD33 AF5 HL x F12Q HL
QVQLVQSGAEVKKPGASVKVSCKASGYTFTNYGMNWVKQAPGQGLKWMGWINTYTGEPTYADDFKGRVTMTSDTSTSTAYLELHNLRSDDTAVYYCARWSWSDGYYVYFDYWGQGTTVTVSSGGGGSGGGGSGGGGSDIVMTQSPDSLTVSLGERTTINCKSSQSVLDSSKNKNSLAWYQQKPGQPPKLLLSWASTRESGIPDRFSGSGSGTDFTLTIDSLQPEDSATYYCQQSAHFPITFGQGTRLEIKSGGGGSEVQLVESGGGLVQPGGSLKLSCAASGFTFNSYAMNWVRQAPGKGLEWVARIRSKYNNYATYYADSVKGRFTISRDDSKNTAYLQMNNLKTEDTAVYYCVRHGNFGNSYVSWWAYWGQGTLVTVSSGGGGSGGGGSGGGGSQTVVTQEPSLTVSPGGTVTLTCGSSTGAVTSGNYPNWVQQKPGQAPRGLIGGTKFLAPGTPARFSGSLLGGKAALTLSGVQPEDEAEYYCVLWYSNRWVFGGGTKLTVL

SEQ ID NO: 266 - DNA, 1515 bp, Artificial Sequence
  CD33 AF5 HL x F12Q HL
caggtgcagctggtgcagtctggagctgaggtgaagaagcctggagcgtcagtcaaggtctcctgcaaggctagcgggtataccttcacaaactatggaatgaactgggtgaagcaggctccaggacagggtttaaagtggatgggctggataaacacctacactggagagccaacatatgctgatgacttcaagggacgggttaccatgacttcggatacctctaccagcactgcctatttggaactccacaacctcagaagtgatgacacggctgtatattactgtgcgcgctggagttggagtgatggttactacgtttactttgactactggggccaaggcactacggtcaccgtctcctcaggtggtggtggttctggcggcggcggctccggtggtggtggttctgacatcgtgatgacacagtctccagactccctgactgtgtctctgggcgagaggaccaccatcaactgcaagtccagccagagtgttttagacagctccaagaataagaactccttagcttggtaccagcagaaaccaggacagcctcctaaattactcctttcctgggcatctacgcgggaatccgggatccctgaccgattcagtggcagcgggtctgggacagatttcactctcactattgacagcctgcagcctgaagattctgcaacttactattgtcaacagtctgcccacttcccgatcacctttggccaagggacacgactggagattaaatccggaggtggtggctccgaggtgcagctggtcgagtctggaggaggattggtgcagcctggagggtcattgaaactctcatgtgcagcctctggattcaccttcaatagctacgccatgaactgggtccgccaggctccaggaaagggtttggaatgggttgctcgcataagaagtaaatataataattatgcaacatattatgccgattcagtgaaaggcaggttcaccatctccagagatgattcaaaaaacactgcctatctacaaatgaacaacttgaaaactgaggacactgccgtgtactactgtgtgagacatgggaacttcggtaatagctacgtttcctggtgggcttactggggccaagggactctggtcaccgtctcctcaggtggtggtggttctggcggcggcggctccggtggtggtggttctcagactgttgtgactcaggaaccttcactcaccgtatcacctggtggaacagtcacactcacttgtggctcctcgactggggctgttacatctggcaactacccaaactgggtccaacaaaaaccaggtcaggcaccccgtggtctaataggtgggactaagttcctcgcccccggtactcctgccagattctcaggctccctgcttggaggcaaggctgccctcaccctctcaggggtacagccagaggatgaggcagaatattactgtgttctatggtacagcaaccgctgggtgttcggtggaggaaccaaactgactgtccta

SEQ ID NO: 267 - protein, 505 aa, Artificial Sequence
  CD33 AF5 HL x I2C HL
QVQLVQSGAEVKKPGASVKVSCKASGYTFTNYGMNWVKQAPGQGLKWMGWINTYTGEPTYADDFKGRVTMTSDTSTSTAYLELHNLRSDDTAVYYCARWSWSDGYYVYFDYWGQGTTVTVSSGGGGSGGGGSGGGGSDIVMTQSPDSLTVSLGERTTINCKSSQSVLDSSKNKNSLAWYQQKPGQPPKLLLSWASTRESGIPDRFSGSGSGTDFTLTIDSLQPEDSATYYCQQSAHFPITFGQGTRLEIKSGGGGSEVQLVESGGGLVQPGGSLKLSCAASGFTFNKYAMNWVRQAPGKGLEWVARIRSKYNNYATYYADSVKDRFTISRDDSKNTAYLQMNNLKTEDTAVYYCVRHGNFGNSYISYWAYWGQGTLVTVSSGGGGSGGGGSGGGGSQTVVTQEPSLTVSPGGTVTLTCGSSTGAVTSGNYPNWVQQKPGQAPRGLIGGTKFLAPGTPARFSGSLLGGKAALTLSGVQPEDEAEYYCVLWYSNRWVFGGGTKLTVL

SEQ ID NO: 268 - DNA, 1515 bp, Artificial Sequence
  CD33 AF5 HL x I2C HL
caggtgcagctggtgcagtctggagctgaggtgaagaagcctggagcgtcagtcaaggtctcctgcaaggctagcgggtataccttcacaaactatggaatgaactgggtgaagcaggctccaggacagggtttaaagtggatgggctggataaacacctacactggagagccaacatatgctgatgacttcaagggacgggttaccatgacttcggatacctctaccagcactgcctatttggaactccacaacctcagaagtgatgacacggctgtatattactgtgcgcgctggagttggagtgatggttactacgtttactttgactactggggccaaggcactacggtcaccgtctcctcaggtggtggtggttctggcggcggcggctccggtggtggtggttctgacatcgtgatgacacagtctccagactccctgactgtgtctctgggcgagaggaccaccatcaactgcaagtccagccagagtgttttagacagctccaagaataagaactccttagcttggtaccagcagaaaccaggacagcctcctaaattactcctttcctgggcatctacgcgggaatccgggatccctgaccgattcagtggcagcgggtctgggacagatttcactctcactattgacagcctgcagcctgaagattctgcaacttactattgtcaacagtctgcccacttcccgatcacctttggccaagggacacgactggagattaaatccggaggtggtggctccgaggtgcagctggtcgagtctggaggaggattggtgcagcctggagggtcattgaaactctcatgtgcagcctctggattcaccttcaataagtacgccatgaactgggtccgccaggctccaggaaagggtttggaatgggttgctcgcataagaagtaaatataataattatgcaacatattatgccgattcagtgaaagacaggttcaccatctccagagatgattcaaaaaacactgcctatctacaaatgaacaacttgaaaactgaggacactgccgtgtactactgtgtgagacatgggaacttcggtaatagctacatatcctactgggcttactggggccaagggactctggtcaccgtctcctcaggtggtggtggttctggcggcggcggctccggtggtggtggttctcagactgttgtgactcaggaaccttcactcaccgtatcacctggtggaacagtcacactcacttgtggctcctcgactggggctgttacatctggcaactacccaaactgggtccaacaaaaaccaggtcaggcaccccgtggtctaataggtgggactaagttcctcgcccccggtactcctgccagattctcaggctccctgcttggaggcaaggctgccctcaccctctcaggggtacagccagaggatgaggcagaatattactgtgttctatggtacagcaaccgctgggtgttcggtggaggaaccaaactgactgtccta

SEQ ID NO: 269 - protein, 505 aa, Artificial Sequence
  CD33 AC8 HL x H2C HL
QVQLVQSGAEVKKPGESVKVSCKASGYTFTNYGMNWVKQAPGQGLKWMGWINTYTGEPTYADDFKGRVTMTTDTSTSTAYMEIRNLRNDDTAVYYCARWSWSDGYYVYFDYWGQGTTVTVSSGGGGSGGGGSGGGGSDIVMTQSPDSLTVSLGERTTINCKSSQSVLDSSKNKNSLAWYQQKPGQPPKLLLSWASTRESGIPDRFSGSGSGTDFTLTIDSLQPEDSATYYCQQSAHFPITFGQGTRLEIKSGGGGSEVQLVESGGGLVQPGGSLKLSCAASGFTFNKYAMNWVRQAPGKGLEWVARIRSKYNNYATYYADSVKDRFTISRDDSKNTAYLQMNNLKTEDTAVYYCVRHGNFGNSYISYWAYWGQGTLVTVSSGGGGSGGGGSGGGGSQTVVTQEPSLTVSPGGTVTLTCGSSTGAVTSGYYPNWVQQKPGQAPRGLIGGTKFLAPGTPARFSGSLLGGKAALTLSGVQPEDEAEYYCALWYSNRWVFGGGTKLTVL

SEQ ID NO: 270 - DNA, 1515 bp, Artificial Sequence
  CD33 AC8 HL x H2C HL
caggtgcagctggtgcagtctggagctgaggtgaagaagcctggagagtcagtcaaggtctcctgcaaggctagcgggtataccttcacaaactatggaatgaactgggtgaagcaggctccaggacagggtttaaagtggatgggctggataaacacctacactggagagccaacatatgctgatgacttcaagggacgggttaccatgactacggatacctctaccagcactgcctatatggaaatccgcaacctcagaaatgatgacacggctgtatattactgtgcgcgctggagttggagtgatggttactacgtttactttgactactggggccaaggcactacggtcaccgtctcctcaggtggtggtggttctggcggcggcggctccggtggtggtggttctgacatcgtgatgacacagtctccagactccctgactgtgtctctgggcgagaggaccaccatcaactgcaagtccagccagagtgttttagacagctccaagaataagaactccttagcttggtaccagcagaaaccaggacagcctcctaaattactcctttcctgggcatctacgcgggaatccgggatccctgaccgattcagtggcagcgggtctgggacagatttcactctcactattgacagcctgcagcctgaagattctgcaacttactattgtcaacagtctgcccacttcccgatcacctttggccaagggacacgactggagattaaatccggaggtggtggctccgaggtgcagctggtcgagtctggaggaggattggtgcagcctggagggtcattgaaactctcatgtgcagcctctggattcaccttcaataagtacgccatgaactgggtccgccaggctccaggaaagggtttggaatgggttgctcgcataagaagtaaatataataattatgcaacatattatgccgattcagtgaaagacaggttcaccatctccagagatgattcaaaaaacactgcctatctacaaatgaacaacttgaaaactgaggacactgccgtgtactactgtgtgagacatgggaacttcggtaatagctacatatcctactgggcttactggggccaagggactctggtcaccgtctcctcaggtggtggtggttctggcggcggcggctccggtggtggtggttctcagactgttgtgactcaggaaccttcactcaccgtatcacctggtggaacagtcacactcacttgtggctcctcgactggggctgttacatctggctactacccaaactgggtccaacaaaaaccaggtcaggcaccccgtggtctaataggtgggactaagttcctcgcccccggtactcctgccagattctcaggctccctgcttggaggcaaggctgccctcaccctctcaggggtacagccagaggatgaggcagaatattactgtgctctatggtacagcaaccgctgggtgttcggtggaggaaccaaactgactgtccta

SEQ ID NO: 271 - protein, 505 aa, Artificial Sequence
  CD33 AC8 HL x F12Q HL
QVQLVQSGAEVKKPGESVKVSCKASGYTFTNYGMNWVKQAPGQGLKWMGWINTYTGEPTYADDFKGRVTMTTDTSTSTAYMEIRNLRNDDTAVYYCARWSWSDGYYVYFDYWGQGTTVTVSSGGGGSGGGGSGGGGSDIVMTQSPDSLTVSLGERTTINCKSSQSVLDSSKNKNSLAWYQQKPGQPPKLLLSWASTRESGIPDRFSGSGSGTDFTLTIDSLQPEDSATYYCQQSAHFPITFGQGTRLEIKSGGGGSEVQLVESGGGLVQPGGSLKLSCAASGFTFNSYAMNWVRQAPGKGLEWVARIRSKYNNYATYYADSVKGRFTISRDDSKNTAYLQMNNLKTEDTAVYYCVRHGNFGNSYVSWWAYWGQGTLVTVSSGGGGSGGGGSGGGGSQTVVTQEPSLTVSPGGTVTLTCGSSTGAVTSGNYPNWVQQKPGQAPRGLIGGTKFLAPGTPARFSGSLLGGKAALTLSGVQPEDEAEYYCVLWYSNRWVFGGGTKLTVL

SEQ ID NO: 272 - DNA, 1515 bp, Artificial Sequence
  CD33 AC8 HL x F12Q HL
caggtgcagctggtgcagtctggagctgaggtgaagaagcctggagagtcagtcaaggtctcctgcaaggctagcgggtataccttcacaaactatggaatgaactgggtgaagcaggctccaggacagggtttaaagtggatgggctggataaacacctacactggagagccaacatatgctgatgacttcaagggacgggttaccatgactacggatacctctaccagcactgcctatatggaaatccgcaacctcagaaatgatgacacggctgtatattactgtgcgcgctggagttggagtgatggttactacgtttactttgactactggggccaaggcactacggtcaccgtctcctcaggtggtggtggttctggcggcggcggctccggtggtggtggttctgacatcgtgatgacacagtctccagactccctgactgtgtctctgggcgagaggaccaccatcaactgcaagtccagccagagtgttttagacagctccaagaataagaactccttagcttggtaccagcagaaaccaggacagcctcctaaattactcctttcctgggcatctacgcgggaatccgggatccctgaccgattcagtggcagcgggtctgggacagatttcactctcactattgacagcctgcagcctgaagattctgcaacttactattgtcaacagtctgcccacttcccgatcacctttggccaagggacacgactggagattaaatccggaggtggtggctccgaggtgcagctggtcgagtctggaggaggattggtgcagcctggagggtcattgaaactctcatgtgcagcctctggattcaccttcaatagctacgccatgaactgggtccgccaggctccaggaaagggtttggaatgggttgctcgcataagaagtaaatataataattatgcaacatattatgccgattcagtgaaaggcaggttcaccatctccagagatgattcaaaaaacactgcctatctacaaatgaacaacttgaaaactgaggacactgccgtgtactactgtgtgagacatgggaacttcggtaatagctacgtttcctggtgggcttactggggccaagggactctggtcaccgtctcctcaggtggtggtggttctggcggcggcggctccggtggtggtggttctcagactgttgtgactcaggaaccttcactcaccgtatcacctggtggaacagtcacactcacttgtggctcctcgactggggctgttacatctggcaactacccaaactgggtccaacaaaaaccaggtcaggcaccccgtggtctaataggtgggactaagttcctcgcccccggtactcctgccagattctcaggctccctgcttggaggcaaggctgccctcaccctctcaggggtacagccagaggatgaggcagaatattactgtgttctatggtacagcaaccgctgggtgttcggtggaggaaccaaactgactgtccta

SEQ ID NO: 273 - protein, 505 aa, Artificial Sequence
  CD33 AC8 HL x I2C HL
QVQLVQSGAEVKKPGESVKVSCKASGYTFTNYGMNWVKQAPGQGLKWMGWINTYTGEPTYADDFKGRVTMTTDTSTSTAYMEIRNLRNDDTAVYYCARWSWSDGYYVYFDYWGQGTTVTVSSGGGGSGGGGSGGGGSDIVMTQSPDSLTVSLGERTTINCKSSQSVLDSSKNKNSLAWYQQKPGQPPKLLLSWASTRESGIPDRFSGSGSGTDFTLTIDSLQPEDSATYYCQQSAHFPITFGQGTRLEIKSGGGGSEVQLVESGGGLVQPGGSLKLSCAASGFTFNKYAMNWVRQAPGKGLEWVARIRSKYNNYATYYADSVKDRFTISRDDSKNTAYLQMNNLKTEDTAVYYCVRHGNFGNSYISYWAYWGQGTLVTVSSGGGGSGGGGSGGGGSQTVVTQEPSLTVSPGGTVTLTCGSSTGAVTSGNYPNWVQQKPGQAPRGLIGGTKFLAPGTPARFSGSLLGGKAALTLSGVQPEDEAEYYCVLWYSNRWVFGGGTKLTVL

SEQ ID NO: 274 - DNA, 1515 bp, Artificial Sequence
  CD33 AC8 HL x I2C HL
caggtgcagctggtgcagtctggagctgaggtgaagaagcctggagagtcagtcaaggtctcctgcaaggctagcgggtataccttcacaaactatggaatgaactgggtgaagcaggctccaggacagggtttaaagtggatgggctggataaacacctacactggagagccaacatatgctgatgacttcaagggacgggttaccatgactacggatacctctaccagcactgcctatatggaaatccgcaacctcagaaatgatgacacggctgtatattactgtgcgcgctggagttggagtgatggttactacgtttactttgactactggggccaaggcactacggtcaccgtctcctcaggtggtggtggttctggcggcggcggctccggtggtggtggttctgacatcgtgatgacacagtctccagactccctgactgtgtctctgggcgagaggaccaccatcaactgcaagtccagccagagtgttttagacagctccaagaataagaactccttagcttggtaccagcagaaaccaggacagcctcctaaattactcctttcctgggcatctacgcgggaatccgggatccctgaccgattcagtggcagcgggtctgggacagatttcactctcactattgacagcctgcagcctgaagattctgcaacttactattgtcaacagtctgcccacttcccgatcacctttggccaagggacacgactggagattaaatccggaggtggtggctccgaggtgcagctggtcgagtctggaggaggattggtgcagcctggagggtcattgaaactctcatgtgcagcctctggattcaccttcaataagtacgccatgaactgggtccgccaggctccaggaaagggtttggaatgggttgctcgcataagaagtaaatataataattatgcaacatattatgccgattcagtgaaagacaggttcaccatctccagagatgattcaaaaaacactgcctatctacaaatgaacaacttgaaaactgaggacactgccgtgtactactgtgtgagacatgggaacttcggtaatagctacatatcctactgggcttactggggccaagggactctggtcaccgtctcctcaggtggtggtggttctggcggcggcggctccggtggtggtggttctcagactgttgtgactcaggaaccttcactcaccgtatcacctggtggaacagtcacactcacttgtggctcctcgactggggctgttacatctggcaactacccaaactgggtccaacaaaaaccaggtcaggcaccccgtggtctaataggtgggactaagttcctcgcccccggtactcctgccagattctcaggctccctgcttggaggcaaggctgccctcaccctctcaggggtacagccagaggatgaggcagaatattactgtgttctatggtacagcaaccgctgggtgttcggtggaggaaccaaactgactgtccta

SEQ ID NO: 275 - protein, 505 aa, Artificial Sequence
  CD33 AH11 HL x H2C HL
QVQLVQSGAEVKKPGESVKVSCKASGYTFTNYGMNWVKQAPGQGLKWMGWINTYTGEPTYADDFKGRVTMTSDTSTSTAYMEISSLRSDDTAVYYCARWSWSDGYYVYFDYWGQGTTVTVSSGGGGSGGGGSGGGGSDIVMTQSPDSLTVSLGERTTINCKSSQSVLDSSKNKNSLAWYQQKPGQPPKLLLSWASTRESGIPDRFSGSGSGTDFTLTIDSLQPEDSATYYCQQSAHFPITFGQGTRLEIKSGGGGSEVQLVESGGGLVQPGGSLKLSCAASGFTFNKYAMNWVRQAPGKGLEWVARIRSKYNNYATYYADSVKDRFTISRDDSKNTAYLQMNNLKTEDTAVYYCVRHGNFGNSYISYWAYWGQGTLVTVSSGGGGSGGGGSGGGGSQTVVTQEPSLTVSPGGTVTLTCGSSTGAVTSGYYPNWVQQKPGQAPRGLIGGTKFLAPGTPARFSGSLLGGKAALTLSGVQPEDEAEYYCALWYSNRWVFGGGTKLTVL

SEQ ID NO: 276 - DNA, 1515 bp, Artificial Sequence
  CD33 AH11 HL x H2C HL
caggtgcagctggtgcagtctggagctgaggtgaagaagcctggagagtcagtcaaggtctcctgcaaggctagcgggtataccttcacaaactatggaatgaactgggtgaagcaggctccaggacagggtttaaagtggatgggctggataaacacctacactggagagccaacatatgctgatgacttcaagggacgggttaccatgacttcggatacctctaccagcactgcctatatggaaatcagcagcctcagaagtgatgacacggctgtatattactgtgcgcgctggagttggagtgatggttactacgtttactttgactactggggccaaggcactacggtcaccgtctcctcaggtggtggtggttctggcggcggcggctccggtggtggtggttctgacatcgtgatgacacagtctccagactccctgactgtgtctctgggcgagaggaccaccatcaactgcaagtccagccagagtgttttagacagctccaagaataagaactccttagcttggtaccagcagaaaccaggacagcctcctaaattactcctttcctgggcatctacgcgggaatccgggatccctgaccgattcagtggcagcgggtctgggacagatttcactctcactattgacagcctgcagcctgaagattctgcaacttactattgtcaacagtctgcccacttcccgatcacctttggccaagggacacgactggagattaaatccggaggtggtggctccgaggtgcagctggtcgagtctggaggaggattggtgcagcctggagggtcattgaaactctcatgtgcagcctctggattcaccttcaataagtacgccatgaactgggtccgccaggctccaggaaagggtttggaatgggttgctcgcataagaagtaaatataataattatgcaacatattatgccgattcagtgaaagacaggttcaccatctccagagatgattcaaaaaacactgcctatctacaaatgaacaacttgaaaactgaggacactgccgtgtactactgtgtgagacatgggaacttcggtaatagctacatatcctactgggcttactggggccaagggactctggtcaccgtctcctcaggtggtggtggttctggcggcggcggctccggtggtggtggttctcagactgttgtgactcaggaaccttcactcaccgtatcacctggtggaacagtcacactcacttgtggctcctcgactggggctgttacatctggctactacccaaactgggtccaacaaaaaccaggtcaggcaccccgtggtctaataggtgggactaagttcctcgcccccggtactcctgccagattctcaggctccctgcttggaggcaaggctgccctcaccctctcaggggtacagccagaggatgaggcagaatattactgtgctctatggtacagcaaccgctgggtgttcggtggaggaaccaaactgactgtccta

SEQ ID NO: 277 - protein, 505 aa, Artificial Sequence
  CD33 AH11 HL x F12Q HL
QVQLVQSGAEVKKPGESVKVSCKASGYTFTNYGMNWVKQAPGQGLKWMGWINTYTGEPTYADDFKGRVTMTSDTSTSTAYMEISSLRSDDTAVYYCARWSWSDGYYVYFDYWGQGTTVTVSSGGGGSGGGGSGGGGSDIVMTQSPDSLTVSLGERTTINCKSSQSVLDSSKNKNSLAWYQQKPGQPPKLLLSWASTRESGIPDRFSGSGSGTDFTLTIDSLQPEDSATYYCQQSAHFPITFGQGTRLEIKSGGGGSEVQLVESGGGLVQPGGSLKLSCAASGFTFNSYAMNWVRQAPGKGLEWVARIRSKYNNYATYYADSVKGRFTISRDDSKNTAYLQMNNLKTEDTAVYYCVRHGNFGNSYVSWWAYWGQGTLVTVSSGGGGSGGGGSGGGGSQTVVTQEPSLTVSPGGTVTLTCGSSTGAVTSGNYPNWVQQKPGQAPRGLIGGTKFLAPGTPARFSGSLLGGKAALTLSGVQPEDEAEYYCVLWYSNRWVFGGGTKLTVL

SEQ ID NO: 278 - DNA, 1515 bp, Artificial Sequence
  CD33 AH11 HL x F12Q HL
caggtgcagctggtgcagtctggagctgaggtgaagaagcctggagagtcagtcaaggtctcctgcaaggctagcgggtataccttcacaaactatggaatgaactgggtgaagcaggctccaggacagggtttaaagtggatgggctggataaacacctacactggagagccaacatatgctgatgacttcaagggacgggttaccatgacttcggatacctctaccagcactgcctatatggaaatcagcagcctcagaagtgatgacacggctgtatattactgtgcgcgctggagttggagtgatggttactacgtttactttgactactggggccaaggcactacggtcaccgtctcctcaggtggtggtggttctggcggcggcggctccggtggtggtggttctgacatcgtgatgacacagtctccagactccctgactgtgtctctgggcgagaggaccaccatcaactgcaagtccagccagagtgttttagacagctccaagaataagaactccttagcttggtaccagcagaaaccaggacagcctcctaaattactcctttcctgggcatctacgcgggaatccgggatccctgaccgattcagtggcagcgggtctgggacagatttcactctcactattgacagcctgcagcctgaagattctgcaacttactattgtcaacagtctgcccacttcccgatcacctttggccaagggacacgactggagattaaatccggaggtggtggctccgaggtgcagctggtcgagtctggaggaggattggtgcagcctggagggtcattgaaactctcatgtgcagcctctggattcaccttcaatagctacgccatgaactgggtccgccaggctccaggaaagggtttggaatgggttgctcgcataagaagtaaatataataattatgcaacatattatgccgattcagtgaaaggcaggttcaccatctccagagatgattcaaaaaacactgcctatctacaaatgaacaacttgaaaactgaggacactgccgtgtactactgtgtgagacatgggaacttcggtaatagctacgtttcctggtgggcttactggggccaagggactctggtcaccgtctcctcaggtggtggtggttctggcggcggcggctccggtggtggtggttctcagactgttgtgactcaggaaccttcactcaccgtatcacctggtggaacagtcacactcacttgtggctcctcgactggggctgttacatctggcaactacccaaactgggtccaacaaaaaccaggtcaggcaccccgtggtctaataggtgggactaagttcctcgcccccggtactcctgccagattctcaggctccctgcttggaggcaaggctgccctcaccctctcaggggtacagccagaggatgaggcagaatattactgtgttctatggtacagcaaccgctgggtgttcggtggaggaaccaaactgactgtccta

SEQ ID NO: 279 - protein, 505 aa, Artificial Sequence
  CD33 AH11 HL x I2C HL
QVQLVQSGAEVKKPGESVKVSCKASGYTFTNYGMNWVKQAPGQGLKWMGWINTYTGEPTYADDFKGRVTMTSDTSTSTAYMEISSLRSDDTAVYYCARWSWSDGYYVYFDYWGQGTTVTVSSGGGGSGGGGSGGGGSDIVMTQSPDSLTVSLGERTTINCKSSQSVLDSSKNKNSLAWYQQKPGQPPKLLLSWASTRESGIPDRFSGSGSGTDFTLTIDSLQPEDSATYYCQQSAHFPITFGQGTRLEIKSGGGGSEVQLVESGGGLVQPGGSLKLSCAASGFTFNKYAMNWVRQAPGKGLEWVARIRSKYNNYATYYADSVKDRFTISRDDSKNTAYLQMNNLKTEDTAVYYCVRHGNFGNSYISYWAYWGQGTLVTVSSGGGGSGGGGSGGGGSQTVVTQEPSLTVSPGGTVTLTCGSSTGAVTSGNYPNWVQQKPGQAPRGLIGGTKFLAPGTPARFSGSLLGGKAALTLSGVQPEDEAEYYCVLWYSNRWVFGGGTKLTVL

SEQ ID NO: 280 - DNA, 1515 bp, Artificial Sequence
  CD33 AH11 HL x I2C HL
caggtgcagctggtgcagtctggagctgaggtgaagaagcctggagagtcagtcaaggtctcctgcaaggctagcgggtataccttcacaaactatggaatgaactgggtgaagcaggctccaggacagggtttaaagtggatgggctggataaacacctacactggagagccaacatatgctgatgacttcaagggacgggttaccatgacttcggatacctctaccagcactgcctatatggaaatcagcagcctcagaagtgatgacacggctgtatattactgtgcgcgctggagttggagtgatggttactacgtttactttgactactggggccaaggcactacggtcaccgtctcctcaggtggtggtggttctggcggcggcggctccggtggtggtggttctgacatcgtgatgacacagtctccagactccctgactgtgtctctgggcgagaggaccaccatcaactgcaagtccagccagagtgttttagacagctccaagaataagaactccttagcttggtaccagcagaaaccaggacagcctcctaaattactcctttcctgggcatctacgcgggaatccgggatccctgaccgattcagtggcagcgggtctgggacagatttcactctcactattgacagcctgcagcctgaagattctgcaacttactattgtcaacagtctgcccacttcccgatcacctttggccaagggacacgactggagattaaatccggaggtggtggctccgaggtgcagctggtcgagtctggaggaggattggtgcagcctggagggtcattgaaactctcatgtgcagcctctggattcaccttcaataagtacgccatgaactgggtccgccaggctccaggaaagggtttggaatgggttgctcgcataagaagtaaatataataattatgcaacatattatgccgattcagtgaaagacaggttcaccatctccagagatgattcaaaaaacactgcctatctacaaatgaacaacttgaaaactgaggacactgccgtgtactactgtgtgagacatgggaacttcggtaatagctacatatcctactgggcttactggggccaagggactctggtcaccgtctcctcaggtggtggtggttctggcggcggcggctccggtggtggtggttctcagactgttgtgactcaggaaccttcactcaccgtatcacctggtggaacagtcacactcacttgtggctcctcgactggggctgttacatctggcaactacccaaactgggtccaacaaaaaccaggtcaggcaccccgtggtctaataggtgggactaagttcctcgcccccggtactcctgccagattctcaggctccctgcttggaggcaaggctgccctcaccctctcaggggtacagccagaggatgaggcagaatattactgtgttctatggtacagcaaccgctgggtgttcggtggaggaaccaaactgactgtccta

SEQ ID NO: 281 - protein, 505 aa, Artificial Sequence
  CD33 B3 HL x H2C HL
QVQLVQSGAEVKKPGESVKVSCKASGYTFTNYGMNWVKQAPGQGLEWMGWINTYTGETNYADKFQGRVTFTSDTSTSTAYMELRNLKSDDTAVYYCARWSWSDGYYVYFDYWGQGTTVTVSSGGGGSGGGGSGGGGSDIVMTQSPDSMTVSLGERTTINCKSSQSVLDSSTNKNSLAWYQQKPGQPPKLLLSWASTRESGIPDRFSGSGSGTDFTLTIDSLQPEDSATYYCQQSAHFPITFGQGTRLDIKSGGGGSEVQLVESGGGLVQPGGSLKLSCAASGFTFNKYAMNWVRQAPGKGLEWVARIRSKYNNYATYYADSVKDRFTISRDDSKNTAYLQMNNLKTEDTAVYYCVRHGNFGNSYISYWAYWGQGTLVTVSSGGGGSGGGGSGGGGSQTVVTQEPSLTVSPGGTVTLTCGSSTGAVTSGYYPNWVQQKPGQAPRGLIGGTKFLAPGTPARFSGSLLGGKAALTLSGVQPEDEAEYYCALWYSNRWVFGGGTKLTVL

SEQ ID NO: 282 - DNA, 1515 bp, Artificial Sequence
  CD33 B3 HL x H2C HL
caggtgcagctggtgcagtctggagctgaggtgaagaagcctggagagtcagtcaaggtctcctgcaaggctagcgggtataccttcacaaactatggaatgaactgggtgaagcaggctccaggacagggtttagagtggatgggctggataaacacctacactggagagacaaactatgctgataagttccagggacgcgttaccttcacttcggatacctctaccagcactgcctatatggaactccgcaacctcaaaagtgatgacacggctgtatattactgtgcgcgctggagttggagtgatggttactacgtttactttgactactggggccaaggcactacggtcaccgtctcctcaggtggtggtggttctggcggcggcggctccggtggtggtggttctgacatcgtgatgacacagtctccagactccatgactgtgtctctgggcgagaggaccaccatcaactgcaagtccagccagagtgttttagacagctccacgaataagaactccttagcttggtaccagcagaaaccaggacagcctcctaaattactcctttcctgggcatctacgcgggaatccgggatccctgaccgattcagtggcagcgggtctgggacagatttcactctcactattgacagcctgcagcctgaagattctgcaacttactattgtcaacagtctgcccacttcccgatcacctttggccaagggacacgactggacattaaatccggaggtggtggctccgaggtgcagctggtcgagtctggaggaggattggtgcagcctggagggtcattgaaactctcatgtgcagcctctggattcaccttcaataagtacgccatgaactgggtccgccaggctccaggaaagggtttggaatgggttgctcgcataagaagtaaatataataattatgcaacatattatgccgattcagtgaaagacaggttcaccatctccagagatgattcaaaaaacactgcctatctacaaatgaacaacttgaaaactgaggacactgccgtgtactactgtgtgagacatgggaacttcggtaatagctacatatcctactgggcttactggggccaagggactctggtcaccgtctcctcaggtggtggtggttctggcggcggcggctccggtggtggtggttctcagactgttgtgactcaggaaccttcactcaccgtatcacctggtggaacagtcacactcacttgtggctcctcgactggggctgttacatctggctactacccaaactgggtccaacaaaaaccaggtcaggcaccccgtggtctaataggtgggactaagttcctcgcccccggtactcctgccagattctcaggctccctgcttggaggcaaggctgccctcaccctctcaggggtacagccagaggatgaggcagaatattactgtgctctatggtacagcaaccgctgggtgttcggtggaggaaccaaactgactgtccta

SEQ ID NO: 283 - protein, 505 aa, Artificial Sequence
  CD33 B3 HL x F12Q HL
QVQLVQSGAEVKKPGESVKVSCKASGYTFTNYGMNWVKQAPGQGLEWMGWINTYTGETNYADKFQGRVTFTSDTSTSTAYMELRNLKSDDTAVYYCARWSWSDGYYVYFDYWGQGTTVTVSSGGGGSGGGGSGGGGSDIVMTQSPDSMTVSLGERTTINCKSSQSVLDSSTNKNSLAWYQQKPGQPPKLLLSWASTRESGIPDRFSGSGSGTDFTLTIDSLQPEDSATYYCQQSAHFPITFGQGTRLDIKSGGGGSEVQLVESGGGLVQPGGSLKLSCAASGFTFNSYAMNWVRQAPGKGLEWVARIRSKYNNYATYYADSVKGRFTISRDDSKNTAYLQMNNLKTEDTAVYYCVRHGNFGNSYVSWWAYWGQGTLVTVSSGGGGSGGGGSGGGGSQTVVTQEPSLTVSPGGTVTLTCGSSTGAVTSGNYPNWVQQKPGQAPRGLIGGTKFLAPGTPARFSGSLLGGKAALTLSGVQPEDEAEYYCVLWYSNRWVFGGGTKLTVL

SEQ ID NO: 284 - DNA, 1515 bp, Artificial Sequence
  CD33 B3 HL x F12Q HL
caggtgcagctggtgcagtctggagctgaggtgaagaagcctggagagtcagtcaaggtctcctgcaaggctagcgggtataccttcacaaactatggaatgaactgggtgaagcaggctccaggacagggtttagagtggatgggctggataaacacctacactggagagacaaactatgctgataagttccagggacgcgttaccttcacttcggatacctctaccagcactgcctatatggaactccgcaacctcaaaagtgatgacacggctgtatattactgtgcgcgctggagttggagtgatggttactacgtttactttgactactggggccaaggcactacggtcaccgtctcctcaggtggtggtggttctggcggcggcggctccggtggtggtggttctgacatcgtgatgacacagtctccagactccatgactgtgtctctgggcgagaggaccaccatcaactgcaagtccagccagagtgttttagacagctccacgaataagaactccttagcttggtaccagcagaaaccaggacagcctcctaaattactcctttcctgggcatctacgcgggaatccgggatccctgaccgattcagtggcagcgggtctgggacagatttcactctcactattgacagcctgcagcctgaagattctgcaacttactattgtcaacagtctgcccacttcccgatcacctttggccaagggacacgactggacattaaatccggaggtggtggctccgaggtgcagctggtcgagtctggaggaggattggtgcagcctggagggtcattgaaactctcatgtgcagcctctggattcaccttcaatagctacgccatgaactgggtccgccaggctccaggaaagggtttggaatgggttgctcgcataagaagtaaatataataattatgcaacatattatgccgattcagtgaaaggcaggttcaccatctccagagatgattcaaaaaacactgcctatctacaaatgaacaacttgaaaactgaggacactgccgtgtactactgtgtgagacatgggaacttcggtaatagctacgtttcctggtgggcttactggggccaagggactctggtcaccgtctcctcaggtggtggtggttctggcggcggcggctccggtggtggtggttctcagactgttgtgactcaggaaccttcactcaccgtatcacctggtggaacagtcacactcacttgtggctcctcgactggggctgttacatctggcaactacccaaactgggtccaacaaaaaccaggtcaggcaccccgtggtctaataggtgggactaagttcctcgcccccggtactcctgccagattctcaggctccctgcttggaggcaaggctgccctcaccctctcaggggtacagccagaggatgaggcagaatattactgtgttctatggtacagcaaccgctgggtgttcggtggaggaaccaaactgactgtccta

SEQ ID NO: 285 - protein, 505 aa, Artificial Sequence
  CD33 B3 HL x I2C HL
QVQLVQSGAEVKKPGESVKVSCKASGYTFTNYGMNWVKQAPGQGLEWMGWINTYTGETNYADKFQGRVTFTSDTSTSTAYMELRNLKSDDTAVYYCARWSWSDGYYVYFDYWGQGTTVTVSSGGGGSGGGGSGGGGSDIVMTQSPDSMTVSLGERTTINCKSSQSVLDSSTNKNSLAWYQQKPGQPPKLLLSWASTRESGIPDRFSGSGSGTDFTLTIDSLQPEDSATYYCQQSAHFPITFGQGTRLDIKSGGGGSEVQLVESGGGLVQPGGSLKLSCAASGFTFNKYAMNWVRQAPGKGLEWVARIRSKYNNYATYYADSVKDRFTISRDDSKNTAYLQMNNLKTEDTAVYYCVRHGNFGNSYISYWAYWGQGTLVTVSSGGGGSGGGGSGGGGSQTVVTQEPSLTVSPGGTVTLTCGSSTGAVTSGNYPNWVQQKPGQAPRGLIGGTKFLAPGTPARFSGSLLGGKAALTLSGVQPEDEAEYYCVLWYSNRWVFGGGTKLTVL

SEQ ID NO: 286 - DNA, 1515 bp, Artificial Sequence
  CD33 B3 HL x I2C HL
caggtgcagctggtgcagtctggagctgaggtgaagaagcctggagagtcagtcaaggtctcctgcaaggctagcgggtataccttcacaaactatggaatgaactgggtgaagcaggctccaggacagggtttagagtggatgggctggataaacacctacactggagagacaaactatgctgataagttccagggacgcgttaccttcacttcggatacctctaccagcactgcctatatggaactccgcaacctcaaaagtgatgacacggctgtatattactgtgcgcgctggagttggagtgatggttactacgtttactttgactactggggccaaggcactacggtcaccgtctcctcaggtggtggtggttctggcggcggcggctccggtggtggtggttctgacatcgtgatgacacagtctccagactccatgactgtgtctctgggcgagaggaccaccatcaactgcaagtccagccagagtgttttagacagctccacgaataagaactccttagcttggtaccagcagaaaccaggacagcctcctaaattactcctttcctgggcatctacgcgggaatccgggatccctgaccgattcagtggcagcgggtctgggacagatttcactctcactattgacagcctgcagcctgaagattctgcaacttactattgtcaacagtctgcccacttcccgatcacctttggccaagggacacgactggacattaaatccggaggtggtggctccgaggtgcagctggtcgagtctggaggaggattggtgcagcctggagggtcattgaaactctcatgtgcagcctctggattcaccttcaataagtacgccatgaactgggtccgccaggctccaggaaagggtttggaatgggttgctcgcataagaagtaaatataataattatgcaacatattatgccgattcagtgaaagacaggttcaccatctccagagatgattcaaaaaacactgcctatctacaaatgaacaacttgaaaactgaggacactgccgtgtactactgtgtgagacatgggaacttcggtaatagctacatatcctactgggcttactggggccaagggactctggtcaccgtctcctcaggtggtggtggttctggcggcggcggctccggtggtggtggttctcagactgttgtgactcaggaaccttcactcaccgtatcacctggtggaacagtcacactcacttgtggctcctcgactggggctgttacatctggcaactacccaaactgggtccaacaaaaaccaggtcaggcaccccgtggtctaataggtgggactaagttcctcgcccccggtactcctgccagattctcaggctccctgcttggaggcaaggctgccctcaccctctcaggggtacagccagaggatgaggcagaatattactgtgttctatggtacagcaaccgctgggtgttcggtggaggaaccaaactgactgtccta

SEQ ID NO: 287 - protein, 505 aa, Artificial Sequence
  CD33 F2 HL x H2C HL
QVQLVQSGAEVKKPGESVKVSCKASGYTFTNYGMNWVKQAPGQGLEWMGWINTYTGETNYADKFQGRVTFTSDTSTSTAYMELRNLKSDDTAVYYCARWSWSDGYYVYFDYWGQGTTVTVSSGGGGSGGGGSGGGGSDIVMTQSPDSLSVSLGERTTINCKSSQSVLDSSTNKNSLAWYQQKPGQPPKLLLSWASTRESGIPDRFSGSGSGTDFTLTIDSLQPEDSATYYCQQSAHFPITFGQGTRLEIKSGGGGSEVQLVESGGGLVQPGGSLKLSCAASGFTFNKYAMNWVRQAPGKGLEWVARIRSKYNNYATYYADSVKDRFTISRDDSKNTAYLQMNNLKTEDTAVYYCVRHGNFGNSYISYWAYWGQGTLVTVSSGGGGSGGGGSGGGGSQTVVTQEPSLTVSPGGTVTLTCGSSTGAVTSGYYPNWVQQKPGQAPRGLIGGTKFLAPGTPARFSGSLLGGKAALTLSGVQPEDEAEYYCALWYSNRWVFGGGTKLTVL

SEQ ID NO: 288 - DNA, 1515 bp, Artificial Sequence
  CD33 F2 HL x H2C HL
caggtgcagctggtgcagtctggagctgaggtgaagaagcctggagagtcagtcaaggtctcctgcaaggctagcgggtataccttcacaaactatggaatgaactgggtgaagcaggctccaggacagggtttagagtggatgggctggataaacacctacactggagagacaaactatgctgataagttccagggacgcgttaccttcacttcggatacctctaccagcactgcctatatggaactccgcaacctcaaaagtgatgacacggctgtatattactgtgcgcgctggagttggagtgatggttactacgtttactttgactactggggccaaggcactacggtcaccgtctcctcaggtggtggtggttctggcggcggcggctccggtggtggtggttctgacatcgtgatgacacagtctccagactccctgtctgtgtctctgggcgagaggaccaccatcaactgcaagtccagccagagtgttttagacagctccacgaataagaactccttagcttggtaccagcagaaaccaggacagcctcctaaattactcctttcctgggcatctacgcgggaatccgggatccctgaccgattcagtggcagcgggtctgggacagatttcactctcactattgacagcctgcagcctgaagattctgcaacttactattgtcaacagtctgcccacttcccgatcacctttggccaagggacacgactggagattaaatccggaggtggtggctccgaggtgcagctggtcgagtctggaggaggattggtgcagcctggagggtcattgaaactctcatgtgcagcctctggattcaccttcaataagtacgccatgaactgggtccgccaggctccaggaaagggtttggaatgggttgctcgcataagaagtaaatataataattatgcaacatattatgccgattcagtgaaagacaggttcaccatctccagagatgattcaaaaaacactgcctatctacaaatgaacaacttgaaaactgaggacactgccgtgtactactgtgtgagacatgggaacttcggtaatagctacatatcctactgggcttactggggccaagggactctggtcaccgtctcctcaggtggtggtggttctggcggcggcggctccggtggtggtggttctcagactgttgtgactcaggaaccttcactcaccgtatcacctggtggaacagtcacactcacttgtggctcctcgactggggctgttacatctggctactacccaaactgggtccaacaaaaaccaggtcaggcaccccgtggtctaataggtgggactaagttcctcgcccccggtactcctgccagattctcaggctccctgcttggaggcaaggctgccctcaccctctcaggggtacagccagaggatgaggcagaatattactgtgctctatggtacagcaaccgctgggtgttcggtggaggaaccaaactgactgtccta

SEQ ID NO: 289 - protein, 505 aa, Artificial Sequence
  CD33 F2 HL x F12Q HL
QVQLVQSGAEVKKPGESVKVSCKASGYTFTNYGMNWVKQAPGQGLEWMGWINTYTGETNYADKFQGRVTFTSDTSTSTAYMELRNLKSDDTAVYYCARWSWSDGYYVYFDYWGQGTTVTVSSGGGGSGGGGSGGGGSDIVMTQSPDSLSVSLGERTTINCKSSQSVLDSSTNKNSLAWYQQKPGQPPKLLLSWASTRESGIPDRFSGSGSGTDFTLTIDSLQPEDSATYYCQQSAHFPITFGQGTRLEIKSGGGGSEVQLVESGGGLVQPGGSLKLSCAASGFTFNSYAMNWVRQAPGKGLEWVARIRSKYNNYATYYADSVKGRFTISRDDSKNTAYLQMNNLKTEDTAVYYCVRHGNFGNSYVSWWAYWGQGTLVTVSSGGGGSGGGGSGGGGSQTVVTQEPSLTVSPGGTVTLTCGSSTGAVTSGNYPNWVQQKPGQAPRGLIGGTKFLAPGTPARFSGSLLGGKAALTLSGVQPEDEAEYYCVLWYSNRWVFGGGTKLTVL

SEQ ID NO: 290 - DNA, 1515 bp, Artificial Sequence
  CD33 F2 HL x F12Q HL
caggtgcagctggtgcagtctggagctgaggtgaagaagcctggagagtcagtcaaggtctcctgcaaggctagcgggtataccttcacaaactatggaatgaactgggtgaagcaggctccaggacagggtttagagtggatgggctggataaacacctacactggagagacaaactatgctgataagttccagggacgcgttaccttcacttcggatacctctaccagcactgcctatatggaactccgcaacctcaaaagtgatgacacggctgtatattactgtgcgcgctggagttggagtgatggttactacgtttactttgactactggggccaaggcactacggtcaccgtctcctcaggtggtggtggttctggcggcggcggctccggtggtggtggttctgacatcgtgatgacacagtctccagactccctgtctgtgtctctgggcgagaggaccaccatcaactgcaagtccagccagagtgttttagacagctccacgaataagaactccttagcttggtaccagcagaaaccaggacagcctcctaaattactcctttcctgggcatctacgcgggaatccgggatccctgaccgattcagtggcagcgggtctgggacagatttcactctcactattgacagcctgcagcctgaagattctgcaacttactattgtcaacagtctgcccacttcccgatcacctttggccaagggacacgactggagattaaatccggaggtggtggctccgaggtgcagctggtcgagtctggaggaggattggtgcagcctggagggtcattgaaactctcatgtgcagcctctggattcaccttcaatagctacgccatgaactgggtccgccaggctccaggaaagggtttggaatgggttgctcgcataagaagtaaatataataattatgcaacatattatgccgattcagtgaaaggcaggttcaccatctccagagatgattcaaaaaacactgcctatctacaaatgaacaacttgaaaactgaggacactgccgtgtactactgtgtgagacatgggaacttcggtaatagctacgtttcctggtgggcttactggggccaagggactctggtcaccgtctcctcaggtggtggtggttctggcggcggcggctccggtggtggtggttctcagactgttgtgactcaggaaccttcactcaccgtatcacctggtggaacagtcacactcacttgtggctcctcgactggggctgttacatctggcaactacccaaactgggtccaacaaaaaccaggtcaggcaccccgtggtctaataggtgggactaagttcctcgcccccggtactcctgccagattctcaggctccctgcttggaggcaaggctgccctcaccctctcaggggtacagccagaggatgaggcagaatattactgtgttctatggtacagcaaccgctgggtgttcggtggaggaaccaaactgactgtccta

SEQ ID NO: 291 - protein, 505 aa, Artificial Sequence
  CD33 F2 HL x I2C HL
QVQLVQSGAEVKKPGESVKVSCKASGYTFTNYGMNWVKQAPGQGLEWMGWINTYTGETNYADKFQGRVTFTSDTSTSTAYMELRNLKSDDTAVYYCARWSWSDGYYVYFDYWGQGTTVTVSSGGGGSGGGGSGGGGSDIVMTQSPDSLSVSLGERTTINCKSSQSVLDSSTNKNSLAWYQQKPGQPPKLLLSWASTRESGIPDRFSGSGSGTDFTLTIDSLQPEDSATYYCQQSAHFPITFGQGTRLEIKSGGGGSEVQLVESGGGLVQPGGSLKLSCAASGFTFNKYAMNWVRQAPGKGLEWVARIRSKYNNYATYYADSVKDRFTISRDDSKNTAYLQMNNLKTEDTAVYYCVRHGNFGNSYISYWAYWGQGTLVTVSSGGGGSGGGGSGGGGSQTVVTQEPSLTVSPGGTVTLTCGSSTGAVTSGNYPNWVQQKPGQAPRGLIGGTKFLAPGTPARFSGSLLGGKAALTLSGVQPEDEAEYYCVLWYSNRWVFGGGTKLTVL

SEQ ID NO: 292 - DNA, 1515 bp, Artificial Sequence
  CD33 F2 HL x I2C HL
caggtgcagctggtgcagtctggagctgaggtgaagaagcctggagagtcagtcaaggtctcctgcaaggctagcgggtataccttcacaaactatggaatgaactgggtgaagcaggctccaggacagggtttagagtggatgggctggataaacacctacactggagagacaaactatgctgataagttccagggacgcgttaccttcacttcggatacctctaccagcactgcctatatggaactccgcaacctcaaaagtgatgacacggctgtatattactgtgcgcgctggagttggagtgatggttactacgtttactttgactactggggccaaggcactacggtcaccgtctcctcaggtggtggtggttctggcggcggcggctccggtggtggtggttctgacatcgtgatgacacagtctccagactccctgtctgtgtctctgggcgagaggaccaccatcaactgcaagtccagccagagtgttttagacagctccacgaataagaactccttagcttggtaccagcagaaaccaggacagcctcctaaattactcctttcctgggcatctacgcgggaatccgggatccctgaccgattcagtggcagcgggtctgggacagatttcactctcactattgacagcctgcagcctgaagattctgcaacttactattgtcaacagtctgcccacttcccgatcacctttggccaagggacacgactggagattaaatccggaggtggtggctccgaggtgcagctggtcgagtctggaggaggattggtgcagcctggagggtcattgaaactctcatgtgcagcctctggattcaccttcaataagtacgccatgaactgggtccgccaggctccaggaaagggtttggaatgggttgctcgcataagaagtaaatataataattatgcaacatattatgccgattcagtgaaagacaggttcaccatctccagagatgattcaaaaaacactgcctatctacaaatgaacaacttgaaaactgaggacactgccgtgtactactgtgtgagacatgggaacttcggtaatagctacatatcctactgggcttactggggccaagggactctggtcaccgtctcctcaggtggtggtggttctggcggcggcggctccggtggtggtggttctcagactgttgtgactcaggaaccttcactcaccgtatcacctggtggaacagtcacactcacttgtggctcctcgactggggctgttacatctggcaactacccaaactgggtccaacaaaaaccaggtcaggcaccccgtggtctaataggtgggactaagttcctcgcccccggtactcctgccagattctcaggctccctgcttggaggcaaggctgccctcaccctctcaggggtacagccagaggatgaggcagaatattactgtgttctatggtacagcaaccgctgggtgttcggtggaggaaccaaactgactgtccta

SEQ ID NO: 293 - protein, 505 aa, Artificial Sequence
  CD33 B10 HL x H2C HL
QVQLVQSGAEVKKPGESVKVSCKASGYTFTNYGMNWVKQAPGQGLEWMGWINTYTGEPTYADKFQGRVTMTTDTSTSTAYMEIRNLRSDDTAVYYCARWSWSDGYYVYFDYWGQGTTVTVSSGGGGSGGGGSGGGGSDIVMTQSPDSLTVSLGERTTINCKSSQSVLDSSNNKNSLAWYQQKPGQPPKLLLSWASTRESGIPDRFSGSGSGTDFTLTIDGLQPEDSATYYCQQSAHFPITFGQGTRLEIKSGGGGSEVQLVESGGGLVQPGGSLKLSCAASGFTFNKYAMNWVRQAPGKGLEWVARIRSKYNNYATYYADSVKDRFTISRDDSKNTAYLQMNNLKTEDTAVYYCVRHGNFGNSYISYWAYWGQGTLVTVSSGGGGSGGGGSGGGGSQTVVTQEPSLTVSPGGTVTLTCGSSTGAVTSGYYPNWVQQKPGQAPRGLIGGTKFLAPGTPARFSGSLLGGKAALTLSGVQPEDEAEYYCALWYSNRWVFGGGTKLTVL

SEQ ID NO: 294 - DNA, 1515 bp, Artificial Sequence
  CD33 B10 HL x H2C HL
caggtgcagctggtgcagtctggagctgaggtgaagaagcctggtgagtcagtcaaggtctcctgcaaggctagcgggtataccttcacaaactatggaatgaactgggtgaagcaggctccaggacagggtttagagtggatgggctggataaacacctacactggagagccaacctatgctgataagttccagggacgcgttaccatgactacggatacctctaccagcactgcctatatggaaatccgcaacctcagaagtgatgacacggctgtatattactgtgcgcgctggagttggagtgatggttactacgtttactttgactactggggccaaggcactacggtcaccgtctcctcaggtggtggtggttctggcggcggcggctccggtggtggtggttctgacatcgtgatgacacagtctccagactccctgactgtgtctctgggcgagaggaccaccatcaactgcaagtccagccagagtgttttagacagctccaacaataagaactccttagcttggtaccagcagaaaccaggacagcctcctaaattactcctttcctgggcatctacgcgggaatccgggatccctgaccgattcagtggcagcggttctgggacagatttcactctcactattgacggcctgcagcctgaagattctgcaacttactattgtcaacagtctgcccacttcccgatcacctttggccaagggacacgactggagattaaatccggaggtggtggctccgaggtgcagctggtcgagtctggaggaggattggtgcagcctggagggtcattgaaactctcatgtgcagcctctggattcaccttcaataagtacgccatgaactgggtccgccaggctccaggaaagggtttggaatgggttgctcgcataagaagtaaatataataattatgcaacatattatgccgattcagtgaaagacaggttcaccatctccagagatgattcaaaaaacactgcctatctacaaatgaacaacttgaaaactgaggacactgccgtgtactactgtgtgagacatgggaacttcggtaatagctacatatcctactgggcttactggggccaagggactctggtcaccgtctcctcaggtggtggtggttctggcggcggcggctccggtggtggtggttctcagactgttgtgactcaggaaccttcactcaccgtatcacctggtggaacagtcacactcacttgtggctcctcgactggggctgttacatctggctactacccaaactgggtccaacaaaaaccaggtcaggcaccccgtggtctaataggtgggactaagttcctcgcccccggtactcctgccagattctcaggctccctgcttggaggcaaggctgccctcaccctctcaggggtacagccagaggatgaggcagaatattactgtgctctatggtacagcaaccgctgggtgttcggtggaggaaccaaactgactgtccta

SEQ ID NO: 295 - protein, 505 aa, Artificial Sequence
  CD33 B10 HL x F12Q HL
QVQLVQSGAEVKKPGESVKVSCKASGYTFTNYGMNWVKQAPGQGLEWMGWINTYTGEPTYADKFQGRVTMTTDTSTSTAYMEIRNLRSDDTAVYYCARWSWSDGYYVYFDYWGQGTTVTVSSGGGGSGGGGSGGGGSDIVMTQSPDSLTVSLGERTTINCKSSQSVLDSSNNKNSLAWYQQKPGQPPKLLLSWASTRESGIPDRFSGSGSGTDFTLTIDGLQPEDSATYYCQQSAHFPITFGQGTRLEIKSGGGGSEVQLVESGGGLVQPGGSLKLSCAASGFTFNSYAMNWVRQAPGKGLEWVARIRSKYNNYATYYADSVKGRFTISRDDSKNTAYLQMNNLKTEDTAVYYCVRHGNFGNSYVSWWAYWGQGTLVTVSSGGGGSGGGGSGGGGSQTVVTQEPSLTVSPGGTVTLTCGSSTGAVTSGNYPNWVQQKPGQAPRGLIGGTKFLAPGTPARFSGSLLGGKAALTLSGVQPEDEAEYYCVLWYSNRWVFGGGTKLTVL

SEQ ID NO: 296 - DNA, 1515 bp, Artificial Sequence
  CD33 B10 HL x F12Q HL
caggtgcagctggtgcagtctggagctgaggtgaagaagcctggtgagtcagtcaaggtctcctgcaaggctagcgggtataccttcacaaactatggaatgaactgggtgaagcaggctccaggacagggtttagagtggatgggctggataaacacctacactggagagccaacctatgctgataagttccagggacgcgttaccatgactacggatacctctaccagcactgcctatatggaaatccgcaacctcagaagtgatgacacggctgtatattactgtgcgcgctggagttggagtgatggttactacgtttactttgactactggggccaaggcactacggtcaccgtctcctcaggtggtggtggttctggcggcggcggctccggtggtggtggttctgacatcgtgatgacacagtctccagactccctgactgtgtctctgggcgagaggaccaccatcaactgcaagtccagccagagtgttttagacagctccaacaataagaactccttagcttggtaccagcagaaaccaggacagcctcctaaattactcctttcctgggcatctacgcgggaatccgggatccctgaccgattcagtggcagcggttctgggacagatttcactctcactattgacggcctgcagcctgaagattctgcaacttactattgtcaacagtctgcccacttcccgatcacctttggccaagggacacgactggagattaaatccggaggtggtggctccgaggtgcagctggtcgagtctggaggaggattggtgcagcctggagggtcattgaaactctcatgtgcagcctctggattcaccttcaatagctacgccatgaactgggtccgccaggctccaggaaagggtttggaatgggttgctcgcataagaagtaaatataataattatgcaacatattatgccgattcagtgaaaggcaggttcaccatctccagagatgattcaaaaaacactgcctatctacaaatgaacaacttgaaaactgaggacactgccgtgtactactgtgtgagacatgggaacttcggtaatagctacgtttcctggtgggcttactggggccaagggactctggtcaccgtctcctcaggtggtggtggttctggcggcggcggctccggtggtggtggttctcagactgttgtgactcaggaaccttcactcaccgtatcacctggtggaacagtcacactcacttgtggctcctcgactggggctgttacatctggcaactacccaaactgggtccaacaaaaaccaggtcaggcaccccgtggtctaataggtgggactaagttcctcgcccccggtactcctgccagattctcaggctccctgcttggaggcaaggctgccctcaccctctcaggggtacagccagaggatgaggcagaatattactgtgttctatggtacagcaaccgctgggtgttcggtggaggaaccaaactgactgtccta

SEQ ID NO: 297 - protein, 505 aa, Artificial Sequence
  CD33 B10 HL x I2C HL
QVQLVQSGAEVKKPGESVKVSCKASGYTFTNYGMNWVKQAPGQGLEWMGWINTYTGEPTYADKFQGRVTMTTDTSTSTAYMEIRNLRSDDTAVYYCARWSWSDGYYVYFDYWGQGTTVTVSSGGGGSGGGGSGGGGSDIVMTQSPDSLTVSLGERTTINCKSSQSVLDSSNNKNSLAWYQQKPGQPPKLLLSWASTRESGIPDRFSGSGSGTDFTLTIDGLQPEDSATYYCQQSAHFPITFGQGTRLEIKSGGGGSEVQLVESGGGLVQPGGSLKLSCAASGFTFNKYAMNWVRQAPGKGLEWVARIRSKYNNYATYYADSVKDRFTISRDDSKNTAYLQMNNLKTEDTAVYYCVRHGNFGNSYISYWAYWGQGTLVTVSSGGGGSGGGGSGGGGSQTVVTQEPSLTVSPGGTVTLTCGSSTGAVTSGNYPNWVQQKPGQAPRGLIGGTKFLAPGTPARFSGSLLGGKAALTLSGVQPEDEAEYYCVLWYSNRWVFGGGTKLTVL

SEQ ID NO: 298 - DNA, 1515 bp, Artificial Sequence
  CD33 B10 HL x I2C HL
caggtgcagctggtgcagtctggagctgaggtgaagaagcctggtgagtcagtcaaggtctcctgcaaggctagcgggtataccttcacaaactatggaatgaactgggtgaagcaggctccaggacagggtttagagtggatgggctggataaacacctacactggagagccaacctatgctgataagttccagggacgcgttaccatgactacggatacctctaccagcactgcctatatggaaatccgcaacctcagaagtgatgacacggctgtatattactgtgcgcgctggagttggagtgatggttactacgtttactttgactactggggccaaggcactacggtcaccgtctcctcaggtggtggtggttctggcggcggcggctccggtggtggtggttctgacatcgtgatgacacagtctccagactccctgactgtgtctctgggcgagaggaccaccatcaactgcaagtccagccagagtgttttagacagctccaacaataagaactccttagcttggtaccagcagaaaccaggacagcctcctaaattactcctttcctgggcatctacgcgggaatccgggatccctgaccgattcagtggcagcggttctgggacagatttcactctcactattgacggcctgcagcctgaagattctgcaacttactattgtcaacagtctgcccacttcccgatcacctttggccaagggacacgactggagattaaatccggaggtggtggctccgaggtgcagctggtcgagtctggaggaggattggtgcagcctggagggtcattgaaactctcatgtgcagcctctggattcaccttcaataagtacgccatgaactgggtccgccaggctccaggaaagggtttggaatgggttgctcgcataagaagtaaatataataattatgcaacatattatgccgattcagtgaaagacaggttcaccatctccagagatgattcaaaaaacactgcctatctacaaatgaacaacttgaaaactgaggacactgccgtgtactactgtgtgagacatgggaacttcggtaatagctacatatcctactgggcttactggggccaagggactctggtcaccgtctcctcaggtggtggtggttctggcggcggcggctccggtggtggtggttctcagactgttgtgactcaggaaccttcactcaccgtatcacctggtggaacagtcacactcacttgtggctcctcgactggggctgttacatctggcaactacccaaactgggtccaacaaaaaccaggtcaggcaccccgtggtctaataggtgggactaagttcctcgcccccggtactcctgccagattctcaggctccctgcttggaggcaaggctgccctcaccctctcaggggtacagccagaggatgaggcagaatattactgtgttctatggtacagcaaccgctgggtgttcggtggaggaaccaaactgactgtccta

SEQ ID NO: 299 - protein, 505 aa, Artificial Sequence
  CD33 E11 HL x H2C HL
QVQLVQSGAEVKKPGESVKVSCKASGYTFTNYGMNWVKQAPGQGLEWMGWINTYTGEPTYADKFQGRVTMTTDTSTSTAYMEIRNLGGDDTAVYYCARWSWSDGYYVYFDYWGQGTSVTVSSGGGGSGGGGSGGGGSDIVMTQSPDSLTVSLGERTTINCKSSQSVLDSSTNKNSLAWYQQKPGQPPKLLLSWASTRESGIPDRFSGSGSGTDFTLTIDSPQPEDSATYYCQQSAHFPITFGQGTRLEIKSGGGGSEVQLVESGGGLVQPGGSLKLSCAASGFTFNKYAMNWVRQAPGKGLEWVARIRSKYNNYATYYADSVKDRFTISRDDSKNTAYLQMNNLKTEDTAVYYCVRHGNFGNSYISYWAYWGQGTLVTVSSGGGGSGGGGSGGGGSQTVVTQEPSLTVSPGGTVTLTCGSSTGAVTSGYYPNWVQQKPGQAPRGLIGGTKFLAPGTPARFSGSLLGGKAALTLSGVQPEDEAEYYCALWYSNRWVFGGGTKLTVL

SEQ ID NO: 300 - DNA, 1515 bp, Artificial Sequence
  CD33 E11 HL x H2C HL
caggtgcagctggtgcagtctggagctgaggtgaagaagcctggagagtcagtcaaggtctcctgcaaggctagcgggtataccttcacaaactatggaatgaactgggtgaagcaggctccaggacagggtttagagtggatgggctggataaacacctacactggagagccaacctatgctgataagttccagggacgcgttaccatgactacggatacctctaccagcactgcctatatggaaatccgcaacctcggaggtgatgacacggctgtatattactgtgcgcgctggagttggagtgatggttactacgtttactttgactactggggccaaggcacttcggtcaccgtctcctcaggtggtggtggttctggcggcggcggctccggtggtggtggttctgacatcgtgatgacacagtctccagactccctgactgtgtctctgggcgagaggaccaccatcaactgcaagtccagccagagtgttttagacagctccacgaataagaactccttagcttggtaccagcagaaaccaggacagcctcctaaattactcctttcctgggcatctacgcgggaatccgggatccctgaccgattcagtggcagcgggtctgggacagatttcactctcactattgacagcccgcagcctgaagattctgcaacttactattgtcaacagtctgcccacttcccgatcacctttggccaagggacacgactggagattaaatccggaggtggtggctccgaggtgcagctggtcgagtctggaggaggattggtgcagcctggagggtcattgaaactctcatgtgcagcctctggattcaccttcaataagtacgccatgaactgggtccgccaggctccaggaaagggtttggaatgggttgctcgcataagaagtaaatataataattatgcaacatattatgccgattcagtgaaagacaggttcaccatctccagagatgattcaaaaaacactgcctatctacaaatgaacaacttgaaaactgaggacactgccgtgtactactgtgtgagacatgggaacttcggtaatagctacatatcctactgggcttactggggccaagggactctggtcaccgtctcctcaggtggtggtggttctggcggcggcggctccggtggtggtggttctcagactgttgtgactcaggaaccttcactcaccgtatcacctggtggaacagtcacactcacttgtggctcctcgactggggctgttacatctggctactacccaaactgggtccaacaaaaaccaggtcaggcaccccgtggtctaataggtgggactaagttcctcgcccccggtactcctgccagattctcaggctccctgcttggaggcaaggctgccctcaccctctcaggggtacagccagaggatgaggcagaatattactgtgctctatggtacagcaaccgctgggtgttcggtggaggaaccaaactgactgtccta

SEQ ID NO: 301 - protein, 505 aa, Artificial Sequence
  CD33 E11 HL x F12Q HL
QVQLVQSGAEVKKPGESVKVSCKASGYTFTNYGMNWVKQAPGQGLEWMGWINTYTGEPTYADKFQGRVTMTTDTSTSTAYMEIRNLGGDDTAVYYCARWSWSDGYYVYFDYWGQGTSVTVSSGGGGSGGGGSGGGGSDIVMTQSPDSLTVSLGERTTINCKSSQSVLDSSTNKNSLAWYQQKPGQPPKLLLSWASTRESGIPDRFSGSGSGTDFTLTIDSPQPEDSATYYCQQSAHFPITFGQGTRLEIKSGGGGSEVQLVESGGGLVQPGGSLKLSCAASGFTFNSYAMNWVRQAPGKGLEWVARIRSKYNNYATYYADSVKGRFTISRDDSKNTAYLQMNNLKTEDTAVYYCVRHGNFGNSYVSWWAYWGQGTLVTVSSGGGGSGGGGSGGGGSQTVVTQEPSLTVSPGGTVTLTCGSSTGAVTSGNYPNWVQQKPGQAPRGLIGGTKFLAPGTPARFSGSLLGGKAALTLSGVQPEDEAEYYCVLWYSNRWVFGGGTKLTVL

SEQ ID NO: 302 - DNA, 1515 bp, Artificial Sequence
  CD33 E11 HL x F12Q HL
caggtgcagctggtgcagtctggagctgaggtgaagaagcctggagagtcagtcaaggtctcctgcaaggctagcgggtataccttcacaaactatggaatgaactgggtgaagcaggctccaggacagggtttagagtggatgggctggataaacacctacactggagagccaacctatgctgataagttccagggacgcgttaccatgactacggatacctctaccagcactgcctatatggaaatccgcaacctcggaggtgatgacacggctgtatattactgtgcgcgctggagttggagtgatggttactacgtttactttgactactggggccaaggcacttcggtcaccgtctcctcaggtggtggtggttctggcggcggcggctccggtggtggtggttctgacatcgtgatgacacagtctccagactccctgactgtgtctctgggcgagaggaccaccatcaactgcaagtccagccagagtgttttagacagctccacgaataagaactccttagcttggtaccagcagaaaccaggacagcctcctaaattactcctttcctgggcatctacgcgggaatccgggatccctgaccgattcagtggcagcgggtctgggacagatttcactctcactattgacagcccgcagcctgaagattctgcaacttactattgtcaacagtctgcccacttcccgatcacctttggccaagggacacgactggagattaaatccggaggtggtggctccgaggtgcagctggtcgagtctggaggaggattggtgcagcctggagggtcattgaaactctcatgtgcagcctctggattcaccttcaatagctacgccatgaactgggtccgccaggctccaggaaagggtttggaatgggttgctcgcataagaagtaaatataataattatgcaacatattatgccgattcagtgaaaggcaggttcaccatctccagagatgattcaaaaaacactgcctatctacaaatgaacaacttgaaaactgaggacactgccgtgtactactgtgtgagacatgggaacttcggtaatagctacgtttcctggtgggcttactggggccaagggactctggtcaccgtctcctcaggtggtggtggttctggcggcggcggctccggtggtggtggttctcagactgttgtgactcaggaaccttcactcaccgtatcacctggtggaacagtcacactcacttgtggctcctcgactggggctgttacatctggcaactacccaaactgggtccaacaaaaaccaggtcaggcaccccgtggtctaataggtgggactaagttcctcgcccccggtactcctgccagattctcaggctccctgcttggaggcaaggctgccctcaccctctcaggggtacagccagaggatgaggcagaatattactgtgttctatggtacagcaaccgctgggtgttcggtggaggaaccaaactgactgtccta

SEQ ID NO: 303 - protein, 505 aa, Artificial Sequence
  CD33 E11 HL x I2C HL
QVQLVQSGAEVKKPGESVKVSCKASGYTFTNYGMNWVKQAPGQGLEWMGWINTYTGEPTYADKFQGRVTMTTDTSTSTAYMEIRNLGGDDTAVYYCARWSWSDGYYVYFDYWGQGTSVTVSSGGGGSGGGGSGGGGSDIVMTQSPDSLTVSLGERTTINCKSSQSVLDSSTNKNSLAWYQQKPGQPPKLLLSWASTRESGIPDRFSGSGSGTDFTLTIDSPQPEDSATYYCQQSAHFPITFGQGTRLEIKSGGGGSEVQLVESGGGLVQPGGSLKLSCAASGFTFNKYAMNWVRQAPGKGLEWVARIRSKYNNYATYYADSVKDRFTISRDDSKNTAYLQMNNLKTEDTAVYYCVRHGNFGNSYISYWAYWGQGTLVTVSSGGGGSGGGGSGGGGSQTVVTQEPSLTVSPGGTVTLTCGSSTGAVTSGNYPNWVQQKPGQAPRGLIGGTKFLAPGTPARFSGSLLGGKAALTLSGVQPEDEAEYYCVLWYSNRWVFGGGTKLTVL

SEQ ID NO: 304 - DNA, 1515 bp, Artificial Sequence
  CD33 E11 HL x I2C HL
caggtgcagctggtgcagtctggagctgaggtgaagaagcctggagagtcagtcaaggtctcctgcaaggctagcgggtataccttcacaaactatggaatgaactgggtgaagcaggctccaggacagggtttagagtggatgggctggataaacacctacactggagagccaacctatgctgataagttccagggacgcgttaccatgactacggatacctctaccagcactgcctatatggaaatccgcaacctcggaggtgatgacacggctgtatattactgtgcgcgctggagttggagtgatggttactacgtttactttgactactggggccaaggcacttcggtcaccgtctcctcaggtggtggtggttctggcggcggcggctccggtggtggtggttctgacatcgtgatgacacagtctccagactccctgactgtgtctctgggcgagaggaccaccatcaactgcaagtccagccagagtgttttagacagctccacgaataagaactccttagcttggtaccagcagaaaccaggacagcctcctaaattactcctttcctgggcatctacgcgggaatccgggatccctgaccgattcagtggcagcgggtctgggacagatttcactctcactattgacagcccgcagcctgaagattctgcaacttactattgtcaacagtctgcccacttcccgatcacctttggccaagggacacgactggagattaaatccggaggtggtggctccgaggtgcagctggtcgagtctggaggaggattggtgcagcctggagggtcattgaaactctcatgtgcagcctctggattcaccttcaataagtacgccatgaactgggtccgccaggctccaggaaagggtttggaatgggttgctcgcataagaagtaaatataataattatgcaacatattatgccgattcagtgaaagacaggttcaccatctccagagatgattcaaaaaacactgcctatctacaaatgaacaacttgaaaactgaggacactgccgtgtactactgtgtgagacatgggaacttcggtaatagctacatatcctactgggcttactggggccaagggactctggtcaccgtctcctcaggtggtggtggttctggcggcggcggctccggtggtggtggttctcagactgttgtgactcaggaaccttcactcaccgtatcacctggtggaacagtcacactcacttgtggctcctcgactggggctgttacatctggcaactacccaaactgggtccaacaaaaaccaggtcaggcaccccgtggtctaataggtgggactaagttcctcgcccccggtactcctgccagattctcaggctccctgcttggaggcaaggctgccctcaccctctcaggggtacagccagaggatgaggcagaatattactgtgttctatggtacagcaaccgctgggtgttcggtggaggaaccaaactgactgtccta

SEQ ID NO: 305 - DNA, 1125 bp, Homo sapiens
atgggatggagctgtatcatcctcttcttggtagcaacagctacaggtgtacactccgatccaaatttctggctgcaagtgcaggagtcagtgacggtacaggagggtttgtgcgtcctcgtgccctgcactttcttccatcccataccctactacgacaagaactccccagttcatggttactggttccgggaaggagccattatatccggggactctccagtggccacaaacaagctagatcaagaagtacaggaggagactcagggcagattccgcctccttggggatcccagtaggaacaactgctccctgagcatcgtagacgccaggaggagggataatggttcatacttctttcggatggagagaggaagtaccaaatacagttacaaatctccccagctctctgtgcatgtgacagacttgacccacaggcccaaaatcctcatccctggcactctagaacccggccactccaaaaacctgacctgctctgtgtcctgggcctgtgagcagggaacacccccgatcttctcctggttgtcagctgcccccacctccctgggccccaggactactcactcctcggtgctcataatcaccccacggccccaggaccacggcaccaacctgacctgtcaggtgaagttcgctggagctggtgtgactacggagagaaccatccagctcaacgtcacctatgttccacagaacccaacaactggtatctttccaggagatggctcagggaaacaagagaccagagcaggagtggttcatggggccattggaggagctggtgttacagccctgctcgctctttgtctctgcctcatcttcttcatagtgaagacccacaggaggaaagcagccaggacagcagtgggcaggaatgacacccaccctaccacagggtcagcctccccgaaacaccagaagaagtccaagttacatggccccactgaaacctcaagctgttcaggtgccgcccctactgtggagatggatgaggagctgcattatgcttccctcaactttcatgggatgaatccttccaaggacacctccaccgaatactcagaggtcaggacccagtccgggcatcatcaccatcatcattga

SEQ ID NO: 306 - protein, 374 aa, Homo sapiens
MGWSCIILFLVATATGVHSDPNFWLQVQESVTVQEGLCVLVPCTFFHPIPYYDKNSPVHGYWFREGAIISGDSPVATNKLDQEVQEETQGRFRLLGDPSRNNCSLSIVDARRRDNGSYFFRMERGSTKYSYKSPQLSVHVTDLTHRPKILIPGTLEPGHSKNLTCSVSWACEQGTPPIFSWLSAAPTSLGPRTTHSSVLIITPRPQDHGTNLTCQVKFAGAGVTTERTIQLNVTYVPQNPTTGIFPGDGSGKQETRAGVVHGAIGGAGVTALLALCLCLIFFIVKTHRRKAARTAVGRNDTHPTTGSASPKHQKKSKLHGPTETSSCSGAAPTVEMDEELHYASLNFHGMNPSKDTSTEYSEVRTQSGHHHHHH

SEQ ID NO: 307 - DNA, 1083 bp, Macaca sp.
atgccgctgctgctactgctgcccctgctgtgggcaggggccctggctatggatccaagagtcaggctggaagtgcaggagtcagtgacagtacaggagggtttgtgcgtccttgtgccctgcactttcttccatcccgtaccctaccacaccaggaattccccagttcatggttactggttccgggaaggagccattgtatccttggactctccagtggccacaaacaagctagatcaagaagtacaggaggagacccagggccgattccgcctccttggggatcccagtaggaacaactgctccctgagcatcgtagatgccaggaggagggataacggttcatacttctttcggatggagaaaggaagtaccaaatacagttacaaatctacccagctctctgtgcatgtgacagacttgacccacaggccccaaatcctcatccctggagccctagaccctgaccactccaaaaacctgacctgctctgtgccctgggcctgtgagcagggaacacctccaatcttctcctggatgtcagctgcccccacctccctgggcctcaggaccactcactcctcggtgctcataatcaccccacggccccaggaccacggcaccaacctcacctgtcaggtgaagttccctggagctggcgtgaccacggagagaaccatccagctcaatgtctcctatgcttcacagaacccaagaactgatatctttctaggagacggctcagggaaacaaggagtggttcagggagccatcgggggagctggtgtcacagtcctgctcgctctttgtctctgcctcatcttcttcacagtgaagactcacaggaggaaagcagccaggacagcagtgggcaggatcgacacccaccccgccacagggccaacatcctcgaaacaccagaagaagtccaagttacatggcgccactgaaacctcaggctgttcaggtaccacccttactgtggagatggatgaggagctgcactacgcttccctcaactttcatgggatgaatccttctgaggacacctccaccgaatactcagaggtcaggacccagtga

SEQ ID NO: 308 - protein, 360 aa, Macaca sp.
MPLLLLLPLLWAGALAMDPRVRLEVQESVTVQEGLCVLVPCTFFHPVPYHTRNSPVHGYWFREGAIVSLDSPVATNKLDQEVQEETQGRFRLLGDPSRNNCSLSIVDARRRDNGSYFFRMEKGSTKYSYKSTQLSVHVTDLTHRPQILIPGALDPDHSKNLTCSVPWACEQGTPPIFSWMSAAPTSLGLRTTHSSVLIITPRPQDHGTNLTCQVKFPGAGVTTERTIQLNVSYASQNPRTDIFLGDGSGKQGVVQGAIGGAGVTVLLALCLCLIFFTVKTHRRKAARTAVGRIDTHPATGPTSSKHQKKSKLHGATETSGCSGTTLTVEMDEELHYASLNFHGMNPSEDTSTEYSEVRTQ

SEQ ID NO: 309 - DNA, 843 bp, Artificial Sequence
  1-27 CD3-Fc + Leader
atgggatggagctgtatcatcctcttcttggtagcaacagctacaggtgtacactcccaagatggtaatgaagaaatgggtggtattacacagacaccatataaagtctccatctctggaaccacagtaatattgacatccggagagcccaaatcttgtgacaaaactcacacatgcccaccgtgcccagcacctgaactcctggggggaccgtcagtcttcctcttccccccaaaacccaaggacaccctcatgatctcccggacccctgaggtcacatgcgtggtggtggacgtgagccacgaagaccctgaggtcaagttcaactggtacgtggacggcgtggaggtgcataatgccaagacaaagccgcgggaggagcagtacaacagcacgtaccgtgtggtcagcgtcctcaccgtcctgcaccaggactggctgaatggcaaggagtacaagtgcaaggtctccaacaaagccctcccagcccccatcgagaaaaccatctccaaagccaaagggcagccccgagaaccacaggtgtacaccctgcccccatcccgggaggagatgaccaagaaccaggtcagcctgacctgcctggtcaaaggcttctatcccagcgacatcgccgtggagtgggagagcaatgggcagccggagaacaactacaagaccacgcctcccgtgctggactccgacggctccttcttcctctatagcaagctcaccgtggacaagagcaggtggcagcaggggaacgtcttctcatgctccgtgatgcatgaggctctgcacaaccactacacgcagaagagcctctccctgtccccgggtaaatag

SEQ ID NO: 310 - protein, 280 aa, Artificial Sequence
  1-27 CD3-Fc + Leader
MGWSCIILFLVATATGVHSQDGNEEMGGITQTPYKVSISGTTVILTSGEPKSCDKTHTCPPCPAPELLGGPSVFLFPPKPKDTLMISRTPEVTCVVVDVSHEDPEVKFNWYVDGVEVHNAKTKPREEQYNSTYRVVSVLTVLHQDWLNGKEYKCKVSNKALPAPIEKTISKAKGQPREPQVYTLPPSREEMTKNQVSLTCLVKGFYPSDIAVEWESNGQPENNYKTTPPVLDSDGSFFLYSKLTVDKSRWQQGNVFSCSVMHEALHNHYTQKSLSLSPGK

SEQ ID NO: 311 - protein, 505 aa, Artificial Sequence
  CD33 UD H2C HL x AF5 HL
EVQLVESGGGLVQPGGSLKLSCAASGFTFNKYAMNWVRQAPGKGLEWVARIRSKYNNYATYYADSVKDRFTISRDDSKNTAYLQMNNLKTEDTAVYYCVRHGNFGNSYISYWAYWGQGTLVTVSSGGGGSGGGGSGGGGSQTVVTQEPSLTVSPGGTVTLTCGSSTGAVTSGYYPNWVQQKPGQAPRGLIGGTKFLAPGTPARFSGSLLGGKAALTLSGVQPEDEAEYYCALWYSNRWVFGGGTKLTVLSGGGGSQVQLVQSGAEVKKPGASVKVSCKASGYTFTNYGMNWVKQAPGQGLKWMGWINTYTGEPTYADDFKGRVTMTSDTSTSTAYLELHNLRSDDTAVYYCARWSWSDGYYVYFDYWGQGTTVTVSSGGGGSGGGGSGGGGSDIVMTQSPDSLTVSLGERTTINCKSSQSVLDSSKNKNSLAWYQQKPGQPPKLLLSWASTRESGIPDRFSGSGSGTDFTLTIDSLQPEDSATYYCQQSAHFPITFGQGTRLEIK

SEQ ID NO: 312 - DNA, 1515 bp, Artificial Sequence
  CD33 UD H2C HL x AF5 HL
gaggtgcagctggtcgagtctggaggaggattggtgcagcctggagggtcattgaaactctcatgtgcagcctctggattcaccttcaataagtacgccatgaactgggtccgccaggctccaggaaagggtttggaatgggttgctcgcataagaagtaaatataataattatgcaacatattatgccgattcagtgaaagacaggttcaccatctccagagatgattcaaaaaacactgcctatctacaaatgaacaacttgaaaactgaggacactgccgtgtactactgtgtgagacatgggaacttcggtaatagctacatatcctactgggcttactggggccaagggactctggtcaccgtctcctcaggtggtggtggttctggcggcggcggctccggtggtggtggttctcagactgttgtgactcaggaaccttcactcaccgtatcacctggtggaacagtcacactcacttgtggctcctcgactggggctgttacatctggctactacccaaactgggtccaacaaaaaccaggtcaggcaccccgtggtctaataggtgggactaagttcctcgcccccggtactcctgccagattctcaggctccctgcttggaggcaaggctgccctcaccctctcaggggtacagccagaggatgaggcagaatattactgtgctctatggtacagcaaccgctgggtgttcggtggaggaaccaaactgactgtcctatccggaggtggtggctcccaggtgcagctggtccagtctggagctgaggtgaagaagcctggagcgtcagtcaaggtctcctgcaaggctagcgggtataccttcacaaactatggaatgaactgggtgaagcaggctccaggacagggtttaaagtggatgggctggataaacacctacactggagagccaacatatgctgatgacttcaagggacgggttaccatgacttcggatacctctaccagcactgcctatttggaactccacaacctcagaagtgatgacacggctgtatattactgtgcgcgctggagttggagtgatggttactacgtttactttgactactggggccaaggcactacggtcaccgtctcctcaggtggtggtggttctggcggcggcggctccggtggtggtggttctgacatcgtgatgacacagtctccagactccctgactgtgtctctgggcgagaggaccaccatcaactgcaagtccagccagagtgttttagacagctccaagaataagaactccttagcttggtaccagcagaaaccaggacagcctcctaaattactcctttcctgggcatctacgcgggaatccgggatccctgaccgattcagtggcagcgggtctgggacagatttcactctcactattgacagcctgcagcctgaagattctgcaacttactattgtcaacagtctgcccacttcccgatcacctttggccaagggacacgactggagattaaa

SEQ ID NO: 313 - protein, 505 aa, Artificial Sequence
  CD33 UD F12Q HL x AF5 HL
EVQLVESGGGLVQPGGSLKLSCAASGFTFNSYAMNWVRQAPGKGLEWVARIRSKYNNYATYYADSVKGRFTISRDDSKNTAYLQMNNLKTEDTAVYYCVRHGNFGNSYVSWWAYWGQGTLVTVSSGGGGSGGGGSGGGGSQTVVTQEPSLTVSPGGTVTLTCGSSTGAVTSGNYPNWVQQKPGQAPRGLIGGTKFLAPGTPARFSGSLLGGKAALTLSGVQPEDEAEYYCVLWYSNRWVFGGGTKLTVLSGGGGSQVQLVQSGAEVKKPGASVKVSCKASGYTFTNYGMNWVKQAPGQGLKWMGWINTYTGEPTYADDFKGRVTMTSDTSTSTAYLELHNLRSDDTAVYYCARWSWSDGYYVYFDYWGQGTTVTVSSGGGGSGGGGSGGGGSDIVMTQSPDSLTVSLGERTTINCKSSQSVLDSSKNKNSLAWYQQKPGQPPKLLLSWASTRESGIPDRFSGSGSGTDFTLTIDSLQPEDSATYYCQQSAHFPITFGQGTRLEIK

SEQ ID NO: 314 - DNA, 1515 bp, Artificial Sequence
  CD33 UD F12Q HL x AF5 HL
gaggtgcagctggtcgagtctggaggaggattggtgcagcctggagggtcattgaaactctcatgtgcagcctctggattcaccttcaatagctacgccatgaactgggtccgccaggctccaggaaagggtttggaatgggttgctcgcataagaagtaaatataataattatgcaacatattatgccgattcagtgaaaggcaggttcaccatctccagagatgattcaaaaaacactgcctatctacaaatgaacaacttgaaaactgaggacactgccgtgtactactgtgtgagacatgggaacttcggtaatagctacgtttcctggtgggcttactggggccaagggactctggtcaccgtctcctcaggtggtggtggttctggcggcggcggctccggtggtggtggttctcagactgttgtgactcaggaaccttcactcaccgtatcacctggtggaacagtcacactcacttgtggctcctcgactggggctgttacatctggcaactacccaaactgggtccaacaaaaaccaggtcaggcaccccgtggtctaataggtgggactaagttcctcgcccccggtactcctgccagattctcaggctccctgcttggaggcaaggctgccctcaccctctcaggggtacagccagaggatgaggcagaatattactgtgttctatggtacagcaaccgctgggtgttcggtggaggaaccaaactgactgtcctatccggaggtggtggctcccaggtgcagctggtccagtctggagctgaggtgaagaagcctggagcgtcagtcaaggtctcctgcaaggctagcgggtataccttcacaaactatggaatgaactgggtgaagcaggctccaggacagggtttaaagtggatgggctggataaacacctacactggagagccaacatatgctgatgacttcaagggacgggttaccatgacttcggatacctctaccagcactgcctatttggaactccacaacctcagaagtgatgacacggctgtatattactgtgcgcgctggagttggagtgatggttactacgtttactttgactactggggccaaggcactacggtcaccgtctcctcaggtggtggtggttctggcggcggcggctccggtggtggtggttctgacatcgtgatgacacagtctccagactccctgactgtgtctctgggcgagaggaccaccatcaactgcaagtccagccagagtgttttagacagctccaagaataagaactccttagcttggtaccagcagaaaccaggacagcctcctaaattactcctttcctgggcatctacgcgggaatccgggatccctgaccgattcagtggcagcgggtctgggacagatttcactctcactattgacagcctgcagcctgaagattctgcaacttactattgtcaacagtctgcccacttcccgatcacctttggccaagggacacgactggagattaaa

SEQ ID NO: 315 - protein, 505 aa, Artificial Sequence
  CD33 UD I2C HL x AF5 HL
EVQLVESGGGLVQPGGSLKLSCAASGFTFNKYAMNWVRQAPGKGLEWVARIRSKYNNYATYYADSVKDRFTISRDDSKNTAYLQMNNLKTEDTAVYYCVRHGNFGNSYISYWAYWGQGTLVTVSSGGGGSGGGGSGGGGSQTVVTQEPSLTVSPGGTVTLTCGSSTGAVTSGNYPNWVQQKPGQAPRGLIGGTKFLAPGTPARFSGSLLGGKAALTLSGVQPEDEAEYYCVLWYSNRWVFGGGTKLTVLSGGGGSQVQLVQSGAEVKKPGASVKVSCKASGYTFTNYGMNWVKQAPGQGLKWMGWINTYTGEPTYADDFKGRVTMTSDTSTSTAYLELHNLRSDDTAVYYCARWSWSDGYYVYFDYWGQGTTVTVSSGGGGSGGGGSGGGGSDIVMTQSPDSLTVSLGERTTINCKSSQSVLDSSKNKNSLAWYQQKPGQPPKLLLSWASTRESGIPDRFSGSGSGTDFTLTIDSLQPEDSATYYCQQSAHFPITFGQGTRLEIK

SEQ ID NO: 316 - DNA, 1515 bp, Artificial Sequence
  CD33 UD I2C HL x AF5 HL
gaggtgcagctggtcgagtctggaggaggattggtgcagcctggagggtcattgaaactctcatgtgcagcctctggattcaccttcaataagtacgccatgaactgggtccgccaggctccaggaaagggtttggaatgggttgctcgcataagaagtaaatataataattatgcaacatattatgccgattcagtgaaagacaggttcaccatctccagagatgattcaaaaaacactgcctatctacaaatgaacaacttgaaaactgaggacactgccgtgtactactgtgtgagacatgggaacttcggtaatagctacatatcctactgggcttactggggccaagggactctggtcaccgtctcctcaggtggtggtggttctggcggcggcggctccggtggtggtggttctcagactgttgtgactcaggaaccttcactcaccgtatcacctggtggaacagtcacactcacttgtggctcctcgactggggctgttacatctggcaactacccaaactgggtccaacaaaaaccaggtcaggcaccccgtggtctaataggtgggactaagttcctcgcccccggtactcctgccagattctcaggctccctgcttggaggcaaggctgccctcaccctctcaggggtacagccagaggatgaggcagaatattactgtgttctatggtacagcaaccgctgggtgttcggtggaggaaccaaactgactgtcctatccggaggtggtggctcccaggtgcagctggtccagtctggagctgaggtgaagaagcctggagcgtcagtcaaggtctcctgcaaggctagcgggtataccttcacaaactatggaatgaactgggtgaagcaggctccaggacagggtttaaagtggatgggctggataaacacctacactggagagccaacatatgctgatgacttcaagggacgggttaccatgacttcggatacctctaccagcactgcctatttggaactccacaacctcagaagtgatgacacggctgtatattactgtgcgcgctggagttggagtgatggttactacgtttactttgactactggggccaaggcactacggtcaccgtctcctcaggtggtggtggttctggcggcggcggctccggtggtggtggttctgacatcgtgatgacacagtctccagactccctgactgtgtctctgggcgagaggaccaccatcaactgcaagtccagccagagtgttttagacagctccaagaataagaactccttagcttggtaccagcagaaaccaggacagcctcctaaattactcctttcctgggcatctacgcgggaatccgggatccctgaccgattcagtggcagcgggtctgggacagatttcactctcactattgacagcctgcagcctgaagattctgcaacttactattgtcaacagtctgcccacttcccgatcacctttggccaagggacacgactggagattaaa

SEQ ID NO: 317 - protein, 500 aa, Artificial Sequence
  MCSP-A9 HL x H2C HL
QVQLVQSGAEVKKPGASVKVSCKASGYPFTGYYMHWVRQAPGQGLEWMGWINPNSGGTNYAQKFQGRVTITADESTSTAYMELSRLRSDDTAVYYCAKSWVSWFASWGQGTLVTVSSGGGGSGGGGSGGGGSDIVMTQSPDSLAVSLGERATINCKSSQSVLSSSNNKNYLNWYQQKPGQPPKLLIYWASTRESGVPDRFSGSGSGTDFTLTISSLQAEDVAVYYCQQHFNTPFAFGQGTKLEIKSGGGGSEVQLVESGGGLVQPGGSLKLSCAASGFTFNKYAMNWVRQAPGKGLEWVARIRSKYNNYATYYADSVKDRFTISRDDSKNTAYLQMNNLKTEDTAVYYCVRHGNFGNSYISYWAYWGQGTLVTVSSGGGGSGGGGSGGGGSQTVVTQEPSLTVSPGGTVTLTCGSSTGAVTSGYYPNWVQQKPGQAPRGLIGGTKFLAPGTPARFSGSLLGGKAALTLSGVQPEDEAEYYCALWYSNRWVFGGGTKLTVL

SEQ ID NO: 318 - DNA, 1500 bp, Artificial Sequence
  MCSP-A9 HL x H2C HL
caggtgcagctggtccagtctggggctgaggtgaagaagcctggggcctcagtgaaggtctcctgcaaggcttctggataccccttcaccggctactacatgcactgggtgcgacaggcccctggacaagggcttgagtggatgggatggatcaaccctaacagtggtggcacaaactatgcacagaagtttcagggcagagtcacgattaccgcggacgaatccacgagcacagcctacatggagctgagcaggctgagatctgacgacacggccgtgtattactgtgcgaaatcctgggtctcctggtttgcttcctggggtcaaggaaccttggtcaccgtctcctcaggtggtggtggttctggcggcggcggctccggtggtggtggttctgacatcgtgatgacacagtctccagactccctggctgtgtctctgggcgagagggccaccatcaactgcaagtccagccagagtgtcttatccagctccaacaataagaactacttaaattggtaccagcagaaaccaggacagcctcctaagttgctcatttactgggcatctacccgggaatccggggtccctgaccgattcagtggcagcgggtctgggacagatttcactctcaccatcagcagcctgcaggctgaagatgtggcggtttattactgtcaacaacattttaatactccgttcgcttttggccaggggaccaagctggagatcaaatccggaggtggtggatccgaggtgcagctggtcgagtctggaggaggattggtgcagcctggagggtcattgaaactctcatgtgcagcctctggattcaccttcaataagtacgccatgaactgggtccgccaggctccaggaaagggtttggaatgggttgctcgcataagaagtaaatataataattatgcaacatattatgccgattcagtgaaagacaggttcaccatctccagagatgattcaaaaaacactgcctatctacaaatgaacaacttgaaaactgaggacactgccgtgtactactgtgtgagacatgggaacttcggtaatagctacatatcctactgggcttactggggccaagggactctggtcaccgtctcctcaggtggtggtggttctggcggcggcggctccggtggtggtggttctcagactgttgtgactcaggaaccttcactcaccgtatcacctggtggaacagtcacactcacttgtggctcctcgactggggctgttacatctggctactacccaaactgggtccaacaaaaaccaggtcaggcaccccgtggtctaataggtgggactaagttcctcgcccccggtactcctgccagattctcaggctccctgcttggaggcaaggctgccctcaccctctcaggggtacagccagaggatgaggcagaatattactgtgctctatggtacagcaaccgctgggtgttcggtggaggaaccaaactgactgtccta

SEQ ID NO: 319 - protein, 500 aa, Artificial Sequence
  MCSP-A9 HL x F12Q HL
QVQLVQSGAEVKKPGASVKVSCKASGYPFTGYYMHWVRQAPGQGLEWMGWINPNSGGTNYAQKFQGRVTITADESTSTAYMELSRLRSDDTAVYYCAKSWVSWFASWGQGTLVTVSSGGGGSGGGGSGGGGSDIVMTQSPDSLAVSLGERATINCKSSQSVLSSSNNKNYLNWYQQKPGQPPKLLIYWASTRESGVPDRFSGSGSGTDFTLTISSLQAEDVAVYYCQQHFNTPFAFGQGTKLEIKSGGGGSEVQLVESGGGLVQPGGSLKLSCAASGFTFNSYAMNWVRQAPGKGLEWVARIRSKYNNYATYYADSVKGRFTISRDDSKNTAYLQMNNLKTEDTAVYYCVRHGNFGNSYVSWWAYWGQGTLVTVSSGGGGSGGGGSGGGGSQTVVTQEPSLTVSPGGTVTLTCGSSTGAVTSGNYPNWVQQKPGQAPRGLIGGTKFLAPGTPARFSGSLLGGKAALTLSGVQPEDEAEYYCVLWYSNRWVFGGGTKLTVL

SEQ ID NO: 320 - DNA, 1500 bp, Artificial Sequence
  MCSP-A9 HL x F12Q HL
caggtgcagctggtccagtctggggctgaggtgaagaagcctggggcctcagtgaaggtctcctgcaaggcttctggataccccttcaccggctactacatgcactgggtgcgacaggcccctggacaagggcttgagtggatgggatggatcaaccctaacagtggtggcacaaactatgcacagaagtttcagggcagagtcacgattaccgcggacgaatccacgagcacagcctacatggagctgagcaggctgagatctgacgacacggccgtgtattactgtgcgaaatcctgggtctcctggtttgcttcctggggtcaaggaaccttggtcaccgtctcctcaggtggtggtggttctggcggcggcggctccggtggtggtggttctgacatcgtgatgacacagtctccagactccctggctgtgtctctgggcgagagggccaccatcaactgcaagtccagccagagtgtcttatccagctccaacaataagaactacttaaattggtaccagcagaaaccaggacagcctcctaagttgctcatttactgggcatctacccgggaatccggggtccctgaccgattcagtggcagcgggtctgggacagatttcactctcaccatcagcagcctgcaggctgaagatgtggcggtttattactgtcaacaacattttaatactccgttcgcttttggccaggggaccaagctggagatcaaatccggaggtggtggatccgaggtgcagctggtcgagtctggaggaggattggtgcagcctggagggtcattgaaactctcatgtgcagcctctggattcaccttcaatagctacgccatgaactgggtccgccaggctccaggaaagggtttggaatgggttgctcgcataagaagtaaatataataattatgcaacatattatgccgattcagtgaaaggcaggttcaccatctccagagatgattcaaaaaacactgcctatctacaaatgaacaacttgaaaactgaggacactgccgtgtactactgtgtgagacatgggaacttcggtaatagctacgtttcctggtgggcttactggggccaagggactctggtcaccgtctcctcaggtggtggtggttctggcggcggcggctccggtggtggtggttctcagactgttgtgactcaggaaccttcactcaccgtatcacctggtggaacagtcacactcacttgtggctcctcgactggggctgttacatctggcaactacccaaactgggtccaacaaaaaccaggtcaggcaccccgtggtctaataggtgggactaagttcctcgcccccggtactcctgccagattctcaggctccctgcttggaggcaaggctgccctcaccctctcaggggtacagccagaggatgaggcagaatattactgtgttctatggtacagcaaccgctgggtgttcggtggaggaaccaaactgactgtccta

SEQ ID NO: 321 - protein, 500 aa, Artificial Sequence
  MCSP-A9 HL x I2C HL
QVQLVQSGAEVKKPGASVKVSCKASGYPFTGYYMHWVRQAPGQGLEWMGWINPNSGGTNYAQKFQGRVTITADESTSTAYMELSRLRSDDTAVYYCAKSWVSWFASWGQGTLVTVSSGGGGSGGGGSGGGGSDIVMTQSPDSLAVSLGERATINCKSSQSVLSSSNNKNYLNWYQQKPGQPPKLLIYWASTRESGVPDRFSGSGSGTDFTLTISSLQAEDVAVYYCQQHFNTPFAFGQGTKLEIKSGGGGSEVQLVESGGGLVQPGGSLKLSCAASGFTFNKYAMNWVRQAPGKGLEWVARIRSKYNNYATYYADSVKDRFTISRDDSKNTAYLQMNNLKTEDTAVYYCVRHGNFGNSYISYWAYWGQGTLVTVSSGGGGSGGGGSGGGGSQTVVTQEPSLTVSPGGTVTLTCGSSTGAVTSGNYPNWVQQKPGQAPRGLIGGTKFLAPGTPARFSGSLLGGKAALTLSGVQPEDEAEYYCVLWYSNRWVFGGGTKLTVL

SEQ ID NO: 322 - DNA, 1500 bp, Artificial Sequence
  MCSP-A9 HL x I2C HL
caggtgcagctggtccagtctggggctgaggtgaagaagcctggggcctcagtgaaggtctcctgcaaggcttctggataccccttcaccggctactacatgcactgggtgcgacaggcccctggacaagggcttgagtggatgggatggatcaaccctaacagtggtggcacaaactatgcacagaagtttcagggcagagtcacgattaccgcggacgaatccacgagcacagcctacatggagctgagcaggctgagatctgacgacacggccgtgtattactgtgcgaaatcctgggtctcctggtttgcttcctggggtcaaggaaccttggtcaccgtctcctcaggtggtggtggttctggcggcggcggctccggtggtggtggttctgacatcgtgatgacacagtctccagactccctggctgtgtctctgggcgagagggccaccatcaactgcaagtccagccagagtgtcttatccagctccaacaataagaactacttaaattggtaccagcagaaaccaggacagcctcctaagttgctcatttactgggcatctacccgggaatccggggtccctgaccgattcagtggcagcgggtctgggacagatttcactctcaccatcagcagcctgcaggctgaagatgtggcggtttattactgtcaacaacattttaatactccgttcgcttttggccaggggaccaagctggagatcaaatccggaggtggtggatccgaggtgcagctggtcgagtctggaggaggattggtgcagcctggagggtcattgaaactctcatgtgcagcctctggattcaccttcaataagtacgccatgaactgggtccgccaggctccaggaaagggtttggaatgggttgctcgcataagaagtaaatataataattatgcaacatattatgccgattcagtgaaagacaggttcaccatctccagagatgattcaaaaaacactgcctatctacaaatgaacaacttgaaaactgaggacactgccgtgtactactgtgtgagacatgggaacttcggtaatagctacatatcctactgggcttactggggccaagggactctggtcaccgtctcctcaggtggtggtggttctggcggcggcggctccggtggtggtggttctcagactgttgtgactcaggaaccttcactcaccgtatcacctggtggaacagtcacactcacttgtggctcctcgactggggctgttacatctggcaactacccaaactgggtccaacaaaaaccaggtcaggcaccccgtggtctaataggtgggactaagttcctcgcccccggtactcctgccagattctcaggctccctgcttggaggcaaggctgccctcaccctctcaggggtacagccagaggatgaggcagaatattactgtgttctatggtacagcaaccgctgggtgttcggtggaggaaccaaactgactgtccta

SEQ ID NO: 323 - protein, 500 aa, Artificial Sequence
  MCSP-C8 HL x I2C HL
QVQLVQSGAEVKRPGASMKVSCKASGYTFTNYYIHWVRQAPGQGLEWMGWINPNSGATNYAQKFQGRVTMTRDTSTSTVYMELSSLRSEDTAVYYCAKSWVSWFASWGQGTLVTVSSGGGGSGGGGSGGGGSDIVMTQSPDSLAVSLGERATINCKSSQSVLNSKNNRNYLAWYQQKPGQPPKLLIYWASTRESGVPDRFSGSGSGTDFTLTISGLQAEDVAVYYCQQHYSTPFTFGPGTKVDIKSGGGGSEVQLVESGGGLVQPGGSLKLSCAASGFTFNKYAMNWVRQAPGKGLEWVARIRSKYNNYATYYADSVKDRFTISRDDSKNTAYLQMNNLKTEDTAVYYCVRHGNFGNSYISYWAYWGQGTLVTVSSGGGGSGGGGSGGGGSQTVVTQEPSLTVSPGGTVTLTCGSSTGAVTSGNYPNWVQQKPGQAPRGLIGGTKFLAPGTPARFSGSLLGGKAALTLSGVQPEDEAEYYCVLWYSNRWVFGGGTKLTVL

SEQ ID NO: 324 - DNA, 1500 bp, Artificial Sequence
  MCSP-C8 HL x I2C HL
caggtgcagctggtccagtctggggctgaggtgaagaggcctggggcctcaatgaaggtctcctgcaaggcttctgggtacaccttcaccaactactatatacactgggtgcgacaggcccctggacaaggtcttgagtggatgggttggatcaaccctaacagtggtgccacaaactatgcacagaagttccagggcagagtcaccatgaccagggacacgtccacgagcacagtctacatggagctgagcagcctgagatctgaggacacggccgtgtattactgtgcgaaatcctgggtctcctggtttgcttcctggggtcaaggaaccttggtcaccgtctcctcaggtggtggtggttctggcggcggcggctccggtggtggtggttctgacatcgtgatgacccagtctccagactccctggctgtgtctctgggcgagagggccaccatcaactgcaagtccagccagagtgttttaaacagcaagaacaataggaactacttagcttggtaccagcagaaaccaggacagcctcctaagctgctcatttactgggcatctacccgggaatccggggtccctgaccgattcagtggcagcgggtctgggacagatttcactctcaccatcagtggcctgcaggctgaagatgtggcagtttattactgtcagcaacattatagtactccattcacttttggccctgggaccaaagtggatatcaaatccggaggtggtggatccgaggtgcagctggtcgagtctggaggaggattggtgcagcctggagggtcattgaaactctcatgtgcagcctctggattcaccttcaataagtacgccatgaactgggtccgccaggctccaggaaagggtttggaatgggttgctcgcataagaagtaaatataataattatgcaacatattatgccgattcagtgaaagacaggttcaccatctccagagatgattcaaaaaacactgcctatctacaaatgaacaacttgaaaactgaggacactgccgtgtactactgtgtgagacatgggaacttcggtaatagctacatatcctactgggcttactggggccaagggactctggtcaccgtctcctcaggtggtggtggttctggcggcggcggctccggtggtggtggttctcagactgttgtgactcaggaaccttcactcaccgtatcacctggtggaacagtcacactcacttgtggctcctcgactggggctgttacatctggcaactacccaaactgggtccaacaaaaaccaggtcaggcaccccgtggtctaataggtgggactaagttcctcgcccccggtactcctgccagattctcaggctccctgcttggaggcaaggctgccctcaccctctcaggggtacagccagaggatgaggcagaatattactgtgttctatggtacagcaaccgctgggtgttcggtggaggaaccaaactgactgtccta

SEQ ID NO: 325 - protein, 500 aa, Artificial Sequence
  MCSP-B8 HL x I2C HL
QVQLVQSGAEVKRPGASMKVSCKASGYTFTNYYIHWVRQAPGQGLEWMGWINPNSGATNYAQKFQGRVTMTRDTSTSTVYMELSSLRSEDTAVYYCAKSWVSWFASWGQGTLVTVSSGGGGSGGGGSGGGGSDIVMTQSPDSLTVSPGERATINCKSSQSVLNSKNNRNYLAWYQQKPGQPPKLLIYWASTRESGVPDRFSGSGSGTDFTLTIDSLQPEDSATYYCQQHYSTPFTFGQGTRLEIKSGGGGSEVQLVESGGGLVQPGGSLKLSCAASGFTFNKYAMNWVRQAPGKGLEWVARIRSKYNNYATYYADSVKDRFTISRDDSKNTAYLQMNNLKTEDTAVYYCVRHGNFGNSYISYWAYWGQGTLVTVSSGGGGSGGGGSGGGGSQTVVTQEPSLTVSPGGTVTLTCGSSTGAVTSGNYPNWVQQKPGQAPRGLIGGTKFLAPGTPARFSGSLLGGKAALTLSGVQPEDEAEYYCVLWYSNRWVFGGGTKLTVL

SEQ ID NO: 326 - DNA, 1500 bp, Artificial Sequence
  MCSP-B8 HL x I2C HL
caggtgcagctggtccagtctggggctgaggtgaagaggcctggggcctcaatgaaggtctcctgcaaggcttctgggtacaccttcaccaactactatatacactgggtgcgacaggcccctggacaaggtcttgagtggatgggttggatcaaccctaacagtggtgccacaaactatgcacagaagttccagggcagagtcaccatgaccagggacacgtccacgagcacagtctacatggagctgagcagcctgagatctgaggacacggccgtgtattactgtgcgaaatcctgggtctcctggtttgcttcctggggtcaaggaaccttggtcaccgtctcctcaggtggtggtggttctggcggcggcggctccggtggtggtggttctgacatcgtgatgacccagtctccagactccctgactgtgtctccgggcgagagggccaccatcaactgcaagtccagccagagtgttttaaacagcaagaacaataggaactacttagcttggtaccagcagaaaccaggacagcctcctaagctgctcatttactgggcatctacccgggaatccggggtccctgaccgattcagtggcagcgggtctgggacagatttcactctcaccatcgattccctgcagcctgaagatagtgcaacttattactgtcagcaacattatagtactccattcacttttggccaggggaccagactggagatcaaatccggaggtggtggatccgaggtgcagctggtcgagtctggaggaggattggtgcagcctggagggtcattgaaactctcatgtgcagcctctggattcaccttcaataagtacgccatgaactgggtccgccaggctccaggaaagggtttggaatgggttgctcgcataagaagtaaatataataattatgcaacatattatgccgattcagtgaaagacaggttcaccatctccagagatgattcaaaaaacactgcctatctacaaatgaacaacttgaaaactgaggacactgccgtgtactactgtgtgagacatgggaacttcggtaatagctacatatcctactgggcttactggggccaagggactctggtcaccgtctcctcaggtggtggtggttctggcggcggcggctccggtggtggtggttctcagactgttgtgactcaggaaccttcactcaccgtatcacctggtggaacagtcacactcacttgtggctcctcgactggggctgttacatctggcaactacccaaactgggtccaacaaaaaccaggtcaggcaccccgtggtctaataggtgggactaagttcctcgcccccggtactcctgccagattctcaggctccctgcttggaggcaaggctgccctcaccctctcaggggtacagccagaggatgaggcagaatattactgtgttctatggtacagcaaccgctgggtgttcggtggaggaaccaaactgactgtccta

SEQ ID NO: 327 - protein, 500 aa, Artificial Sequence
  MCSP-B7 HL x I2C HL
QVQLVQSGAEVKRPGASMKVSCKASGYTFTNYYIHWVRQAPGQGLEWMGWINPNSGATNYAQKFQGRVTMTRDTSTSTVYMELSSLRSEDTAVYYCAKSWVSWFASWGQGTLVTVSSGGGGSGGGGSGGGGSDIVMTQSPDSLTVSLGERTTINCKSSQSVLNSKNNRNYLAWYQQKPGQPPKLLIYWASTRESGVPDRFSGSGSGTDFTLTIDSLQPEDIATYYCQQHYSTPFTFGQGTRLEIKSGGGGSEVQLVESGGGLVQPGGSLKLSCAASGFTFNKYAMNWVRQAPGKGLEWVARIRSKYNNYATYYADSVKDRFTISRDDSKNTAYLQMNNLKTEDTAVYYCVRHGNFGNSYISYWAYWGQGTLVTVSSGGGGSGGGGSGGGGSQTVVTQEPSLTVSPGGTVTLTCGSSTGAVTSGNYPNWVQQKPGQAPRGLIGGTKFLAPGTPARFSGSLLGGKAALTLSGVQPEDEAEYYCVLWYSNRWVFGGGTKLTVL

SEQ ID NO: 328 - DNA, 1500 bp, Artificial Sequence
  MCSP-B7 HL x I2C HL
caggtgcagctggtccagtctggggctgaggtgaagaggcctggggcctcaatgaaggtctcctgcaaggcttctgggtacaccttcaccaactactatatacactgggtgcgacaggcccctggacaaggtcttgagtggatgggttggatcaaccctaacagtggtgccacaaactatgcacagaagttccagggcagagtcaccatgaccagggacacgtccacgagcacagtctacatggagctgagcagcctgagatctgaggacacggccgtgtattactgtgcgaaatcctgggtctcctggtttgcttcctggggtcaaggaaccttggtcaccgtctcctcaggtggtggtggttctggcggcggcggctccggtggtggtggttctgacatcgtgatgacccagtctccagactccctgactgtgtctctgggcgagaggaccaccatcaactgcaagtccagccagagtgttttaaacagcaagaacaataggaactacttagcttggtaccagcagaaaccaggacagcctcctaagctgctcatttactgggcatctacccgggaatccggggtccctgaccgattcagtggcagcgggtctgggacagatttcactctcaccatcgattccctgcagcctgaagatattgcaacttattactgtcagcaacattatagtactccattcacttttggccaggggaccagactggagatcaaatccggaggtggtggatccgaggtgcagctggtcgagtctggaggaggattggtgcagcctggagggtcattgaaactctcatgtgcagcctctggattcaccttcaataagtacgccatgaactgggtccgccaggctccaggaaagggtttggaatgggttgctcgcataagaagtaaatataataattatgcaacatattatgccgattcagtgaaagacaggttcaccatctccagagatgattcaaaaaacactgcctatctacaaatgaacaacttgaaaactgaggacactgccgtgtactactgtgtgagacatgggaacttcggtaatagctacatatcctactgggcttactggggccaagggactctggtcaccgtctcctcaggtggtggtggttctggcggcggcggctccggtggtggtggttctcagactgttgtgactcaggaaccttcactcaccgtatcacctggtggaacagtcacactcacttgtggctcctcgactggggctgttacatctggcaactacccaaactgggtccaacaaaaaccaggtcaggcaccccgtggtctaataggtgggactaagttcctcgcccccggtactcctgccagattctcaggctccctgcttggaggcaaggctgccctcaccctctcaggggtacagccagaggatgaggcagaatattactgtgttctatggtacagcaaccgctgggtgttcggtggaggaaccaaactgactgtccta

SEQ ID NO: 329 - protein, 500 aa, Artificial Sequence
  MCSP-G8 HL x I2C HL
QVQLVQSGAEVKRPGASMKVSCKASGYTFTNYYIHWVRQAPGQGLEWMGWINPNSGATNYAQKFQGRVTMTRDTSTSTVYMELSSLRSEDTAVYYCAKSWVSWFASWGQGTLVTVSSGGGGSGGGGSGGGGSDIVMTQSPDSLTVSLGERATINCKSSQSVLNSKNNRNYLAWYQQKPGQPPKLLIYWASTRESGVPDRFSGSGSGTDFTLTIDSLQPEDSATYYCQQHYSTPFTFGQGTRLEIKSGGGGSEVQLVESGGGLVQPGGSLKLSCAASGFTFNKYAMNWVRQAPGKGLEWVARIRSKYNNYATYYADSVKDRFTISRDDSKNTAYLQMNNLKTEDTAVYYCVRHGNFGNSYISYWAYWGQGTLVTVSSGGGGSGGGGSGGGGSQTVVTQEPSLTVSPGGTVTLTCGSSTGAVTSGNYPNWVQQKPGQAPRGLIGGTKFLAPGTPARFSGSLLGGKAALTLSGVQPEDEAEYYCVLWYSNRWVFGGGTKLTVL

SEQ ID NO: 330 - DNA, 1500 bp, Artificial Sequence
  MCSP-G8 HL x I2C HL
caggtgcagctggtccagtctggggctgaggtgaagaggcctggggcctcaatgaaggtctcctgcaaggcttctgggtacaccttcaccaactactatatacactgggtgcgacaggcccctggacaaggtcttgagtggatgggttggatcaaccctaacagtggtgccacaaactatgcacagaagttccagggcagagtcaccatgaccagggacacgtccacgagcacagtctacatggagctgagcagcctgagatctgaggacacggccgtgtattactgtgcgaaatcctgggtctcctggtttgcttcctggggtcaaggaaccttggtcaccgtctcctcaggtggtggtggttctggcggcggcggctccggtggtggtggttctgacatcgtgatgacccagtctccagactccctgactgtgtctctgggcgagagggccaccatcaactgcaagtccagccagagtgttttaaacagcaagaacaataggaactacttagcttggtaccagcagaaaccaggacagcctcctaagctgctcatttactgggcatctacccgggaatccggggtccctgaccgattcagtggcagcgggtctgggacagatttcactctcaccatcgattccctgcagcctgaagatagtgcaacttattactgtcagcaacattatagtactccattcacttttggccaggggaccagactggagatcaaatccggaggtggtggatccgaggtgcagctggtcgagtctggaggaggattggtgcagcctggagggtcattgaaactctcatgtgcagcctctggattcaccttcaataagtacgccatgaactgggtccgccaggctccaggaaagggtttggaatgggttgctcgcataagaagtaaatataataattatgcaacatattatgccgattcagtgaaagacaggttcaccatctccagagatgattcaaaaaacactgcctatctacaaatgaacaacttgaaaactgaggacactgccgtgtactactgtgtgagacatgggaacttcggtaatagctacatatcctactgggcttactggggccaagggactctggtcaccgtctcctcaggtggtggtggttctggcggcggcggctccggtggtggtggttctcagactgttgtgactcaggaaccttcactcaccgtatcacctggtggaacagtcacactcacttgtggctcctcgactggggctgttacatctggcaactacccaaactgggtccaacaaaaaccaggtcaggcaccccgtggtctaataggtgggactaagttcctcgcccccggtactcctgccagattctcaggctccctgcttggaggcaaggctgccctcaccctctcaggggtacagccagaggatgaggcagaatattactgtgttctatggtacagcaaccgctgggtgttcggtggaggaaccaaactgactgtccta

SEQ ID NO: 331 - protein, 500 aa, Artificial Sequence
  MCSP-D5 HL x I2C HL
QVQLVQSGAEVKRPGASMKVSCKASGYTFTNYYIHWVRQAPGQGLEWMGWINPNSGATNYAQKFQGRVTMTRDTSTSTVYMELSSLRSEDTAVYYCAKSWVSWFASWGQGTLVTVSSGGGGSGGGGSGGGGSDIVMTQSPDSLAVSLGERATINCKSSQSVLNSKNNRNYLAWYQQKPGQPPKLLIYWASTRESGVPDRFSGSGSGTDFTLTIDSLQAEDSATYYCQQHYSTPFTFGQGTRLEIKSGGGGSEVQLVESGGGLVQPGGSLKLSCAASGFTFNKYAMNWVRQAPGKGLEWVARIRSKYNNYATYYADSVKDRFTISRDDSKNTAYLQMNNLKTEDTAVYYCVRHGNFGNSYISYWAYWGQGTLVTVSSGGGGSGGGGSGGGGSQTVVTQEPSLTVSPGGTVTLTCGSSTGAVTSGNYPNWVQQKPGQAPRGLIGGTKFLAPGTPARFSGSLLGGKAALTLSGVQPEDEAEYYCVLWYSNRWVFGGGTKLTVL

SEQ ID NO: 332 - DNA, 1500 bp, Artificial Sequence
  MCSP-D5 HL x I2C HL
caggtgcagctggtccagtctggggctgaggtgaagaggcctggggcctcaatgaaggtctcctgcaaggcttctgggtacaccttcaccaactactatatacactgggtgcgacaggcccctggacaaggtcttgagtggatgggttggatcaaccctaacagtggtgccacaaactatgcacagaagttccagggcagagtcaccatgaccagggacacgtccacgagcacagtctacatggagctgagcagcctgagatctgaggacacggccgtgtattactgtgcgaaatcctgggtctcctggtttgcttcctggggtcaaggaaccttggtcaccgtctcctcaggtggtggtggttctggcggcggcggctccggtggtggtggttctgacatcgtgatgacccagtctccagactccctggctgtgtctctgggcgagagggccaccatcaactgcaagtccagccagagtgttttaaacagcaagaacaataggaactacttagcttggtaccagcagaaaccaggacagcctcctaagctgctcatttactgggcatctacccgggaatccggggtccctgaccgattcagtggcagcgggtctgggacagatttcactctcaccatcgattccctgcaggctgaagatagtgcaacttattactgtcagcaacattatagtactccattcacttttggccaggggaccagactggagatcaaatccggaggtggtggatccgaggtgcagctggtcgagtctggaggaggattggtgcagcctggagggtcattgaaactctcatgtgcagcctctggattcaccttcaataagtacgccatgaactgggtccgccaggctccaggaaagggtttggaatgggttgctcgcataagaagtaaatataataattatgcaacatattatgccgattcagtgaaagacaggttcaccatctccagagatgattcaaaaaacactgcctatctacaaatgaacaacttgaaaactgaggacactgccgtgtactactgtgtgagacatgggaacttcggtaatagctacatatcctactgggcttactggggccaagggactctggtcaccgtctcctcaggtggtggtggttctggcggcggcggctccggtggtggtggttctcagactgttgtgactcaggaaccttcactcaccgtatcacctggtggaacagtcacactcacttgtggctcctcgactggggctgttacatctggcaactacccaaactgggtccaacaaaaaccaggtcaggcaccccgtggtctaataggtgggactaagttcctcgcccccggtactcctgccagattctcaggctccctgcttggaggcaaggctgccctcaccctctcaggggtacagccagaggatgaggcagaatattactgtgttctatggtacagcaaccgctgggtgttcggtggaggaaccaaactgactgtccta

SEQ ID NO: 333 - protein, 500 aa, Artificial Sequence
  MCSP-F7 HL x I2C HL
QVQLVQSGAEVKRPGASMKVSCKASGYTFTNYYIHWVRQAPGQGLEWMGWINPNSGATNYAQKFQGRVTMTRDTSTSTVYMELSSLRSEDTAVYYCAKSWVSWFASWGQGTLVTVSSGGGGSGGGGSGGGGSDIVMTQSPDSLAVSLGERATINCKSSQSVLNSKNNRNYLAWYQQKPGQPPKLLIYWASTRESGVPDRFSGSGSGTDFTLTIDVLQPEDIATYYCQQHYSTPFTFGQGTRLEIKSGGGGSEVQLVESGGGLVQPGGSLKLSCAASGFTFNKYAMNWVRQAPGKGLEWVARIRSKYNNYATYYADSVKDRFTISRDDSKNTAYLQMNNLKTEDTAVYYCVRHGNFGNSYISYWAYWGQGTLVTVSSGGGGSGGGGSGGGGSQTVVTQEPSLTVSPGGTVTLTCGSSTGAVTSGNYPNWVQQKPGQAPRGLIGGTKFLAPGTPARFSGSLLGGKAALTLSGVQPEDEAEYYCVLWYSNRWVFGGGTKLTVL

SEQ ID NO: 334 - DNA, 1500 bp, Artificial Sequence
  MCSP-F7 HL x I2C HL
caggtgcagctggtccagtctggggctgaggtgaagaggcctggggcctcaatgaaggtctcctgcaaggcttctgggtacaccttcaccaactactatatacactgggtgcgacaggcccctggacaaggtcttgagtggatgggttggatcaaccctaacagtggtgccacaaactatgcacagaagttccagggcagagtcaccatgaccagggacacgtccacgagcacagtctacatggagctgagcagcctgagatctgaggacacggccgtgtattactgtgcgaaatcctgggtctcctggtttgcttcctggggtcaaggaaccttggtcaccgtctcctcaggtggtggtggttctggcggcggcggctccggtggtggtggttctgacatcgtgatgacccagtctccagactccctggctgtgtctctgggcgagagggccaccatcaactgcaagtccagccagagtgttttaaacagcaagaacaataggaactacttagcttggtaccagcagaaaccaggacagcctcctaagctgctcatttactgggcatctacccgggaatccggggtccctgaccgattcagtggcagcgggtctgggacagatttcactctcaccatcgatgtcctgcagcctgaagatattgcaacttattactgtcagcaacattatagtactccattcacttttggccaggggaccagactggagatcaaatccggaggtggtggatccgaggtgcagctggtcgagtctggaggaggattggtgcagcctggagggtcattgaaactctcatgtgcagcctctggattcaccttcaataagtacgccatgaactgggtccgccaggctccaggaaagggtttggaatgggttgctcgcataagaagtaaatataataattatgcaacatattatgccgattcagtgaaagacaggttcaccatctccagagatgattcaaaaaacactgcctatctacaaatgaacaacttgaaaactgaggacactgccgtgtactactgtgtgagacatgggaacttcggtaatagctacatatcctactgggcttactggggccaagggactctggtcaccgtctcctcaggtggtggtggttctggcggcggcggctccggtggtggtggttctcagactgttgtgactcaggaaccttcactcaccgtatcacctggtggaacagtcacactcacttgtggctcctcgactggggctgttacatctggcaactacccaaactgggtccaacaaaaaccaggtcaggcaccccgtggtctaataggtgggactaagttcctcgcccccggtactcctgccagattctcaggctccctgcttggaggcaaggctgccctcaccctctcaggggtacagccagaggatgaggcagaatattactgtgttctatggtacagcaaccgctgggtgttcggtggaggaaccaaactgactgtccta

SEQ ID NO: 335 - protein, 500 aa, Artificial Sequence
  MCSP-G5 HL x I2C HL
QVQLVQSGAEVKRPGASMKVSCKASGYTFTNYYIHWVRQAPGQGLEWMGWINPNSGATNYAQKFQGRVTMTRDTSTSTVYMELSSLRSEDTAVYYCAKSWVSWFASWGQGTLVTVSSGGGGSGGGGSGGGGSDIVMTQSPDSLAVSLGDRATINCKSSQSVLNSKNNRNYLAWYQQKPGQPPKLLIYWASTRESGVPDRFSGSGSGTDFTLTIDSLQPEDSATYYCQQHYSTPFTFGQGTRLEIKSGGGGSEVQLVESGGGLVQPGGSLKLSCAASGFTFNKYAMNWVRQAPGKGLEWVARIRSKYNNYATYYADSVKDRFTISRDDSKNTAYLQMNNLKTEDTAVYYCVRHGNFGNSYISYWAYWGQGTLVTVSSGGGGSGGGGSGGGGSQTVVTQEPSLTVSPGGTVTLTCGSSTGAVTSGNYPNWVQQKPGQAPRGLIGGTKFLAPGTPARFSGSLLGGKAALTLSGVQPEDEAEYYCVLWYSNRWVFGGGTKLTVL

SEQ ID NO: 336 - DNA, 1500 bp, Artificial Sequence
  MCSP-G5 HL x I2C HL
caggtgcagctggtccagtctggggctgaggtgaagaggcctggggcctcaatgaaggtctcctgcaaggcttctgggtacaccttcaccaactactatatacactgggtgcgacaggcccctggacaaggtcttgagtggatgggttggatcaaccctaacagtggtgccacaaactatgcacagaagttccagggcagagtcaccatgaccagggacacgtccacgagcacagtctacatggagctgagcagcctgagatctgaggacacggccgtgtattactgtgcgaaatcctgggtctcctggtttgcttcctggggtcaaggaaccttggtcaccgtctcctcaggtggtggtggttctggcggcggcggctccggtggtggtggttctgacatcgtgatgacccagtctccagactccctggctgtgtctctgggcgacagggccaccatcaactgcaagtccagccagagtgttttaaacagcaagaacaataggaactacttagcttggtaccagcagaaaccaggacagcctcctaagctgctcatttactgggcatctacccgggaatccggggtccctgaccgattcagtggcagcgggtctgggacagatttcactctcaccatcgattccctgcagcctgaggatagtgcaacttattactgtcagcaacattatagtactccattcacttttggccaggggaccagactggagatcaaatccggaggtggtggatccgaggtgcagctggtcgagtctggaggaggattggtgcagcctggagggtcattgaaactctcatgtgcagcctctggattcaccttcaataagtacgccatgaactgggtccgccaggctccaggaaagggtttggaatgggttgctcgcataagaagtaaatataataattatgcaacatattatgccgattcagtgaaagacaggttcaccatctccagagatgattcaaaaaacactgcctatctacaaatgaacaacttgaaaactgaggacactgccgtgtactactgtgtgagacatgggaacttcggtaatagctacatatcctactgggcttactggggccaagggactctggtcaccgtctcctcaggtggtggtggttctggcggcggcggctccggtggtggtggttctcagactgttgtgactcaggaaccttcactcaccgtatcacctggtggaacagtcacactcacttgtggctcctcgactggggctgttacatctggcaactacccaaactgggtccaacaaaaaccaggtcaggcaccccgtggtctaataggtgggactaagttcctcgcccccggtactcctgccagattctcaggctccctgcttggaggcaaggctgccctcaccctctcaggggtacagccagaggatgaggcagaatattactgtgttctatggtacagcaaccgctgggtgttcggtggaggaaccaaactgactgtccta

SEQ ID NO: 337 - protein, 500 aa, Artificial Sequence
  MCSP-F8 HL x I2C HL
QVQLVQSGAEVKRPGASMKVSCKASGYTFTNYYIHWVRQAPGQGLEWMGWINPNSGATNYAQKFQGRVTMTRDTSTSTVYMELSSLRSEDTAVYYCAKSWVSWFASWGQGTLVTVSSGGGGSGGGGSGGGGSDIVMTQSPDSLTVSLGERATINCKSSQSVLNSKNNRNYLAWYQQKPGQPPKLLIYWASTRESGVPDRFSGSGSGTDFTLTIDSLQAEDSAIYYCQQHYSTPFTFGQGTRLEIKSGGGGSEVQLVESGGGLVQPGGSLKLSCAASGFTFNKYAMNWVRQAPGKGLEWVARIRSKYNNYATYYADSVKDRFTISRDDSKNTAYLQMNNLKTEDTAVYYCVRHGNFGNSYISYWAYWGQGTLVTVSSGGGGSGGGGSGGGGSQTVVTQEPSLTVSPGGTVTLTCGSSTGAVTSGNYPNWVQQKPGQAPRGLIGGTKFLAPGTPARFSGSLLGGKAALTLSGVQPEDEAEYYCVLWYSNRWVFGGGTKLTVL

SEQ ID NO: 338 - DNA, 1500 bp, Artificial Sequence
  MCSP-F8 HL x I2C HL
caggtgcagctggtccagtctggggctgaggtgaagaggcctggggcctcaatgaaggtctcctgcaaggcttctgggtacaccttcaccaactactatatacactgggtgcgacaggcccctggacaaggtcttgagtggatgggttggatcaaccctaacagtggtgccacaaactatgcacagaagttccagggcagagtcaccatgaccagggacacgtccacgagcacagtctacatggagctgagcagcctgagatctgaggacacggccgtgtattactgtgcgaaatcctgggtctcctggtttgcttcctggggtcaaggaaccttggtcaccgtctcctcaggtggtggtggttctggcggcggcggctccggtggtggtggttctgacatcgtgatgacccagtctccagactccctgactgtgtctctgggcgagagggccaccatcaactgcaagtccagccagagtgttttaaacagcaagaacaataggaactacttagcttggtaccagcagaaaccaggacagcctcctaagctgctcatttactgggcatctacccgggaatccggggtccctgaccgattcagtggcagcgggtctgggacagatttcactctcaccatcgattccctgcaggctgaagatagtgcaatttattactgtcagcaacattatagtactccattcacttttggccaggggaccagactggagatcaaatccggaggtggtggatccgaggtgcagctggtcgagtctggaggaggattggtgcagcctggagggtcattgaaactctcatgtgcagcctctggattcaccttcaataagtacgccatgaactgggtccgccaggctccaggaaagggtttggaatgggttgctcgcataagaagtaaatataataattatgcaacatattatgccgattcagtgaaagacaggttcaccatctccagagatgattcaaaaaacactgcctatctacaaatgaacaacttgaaaactgaggacactgccgtgtactactgtgtgagacatgggaacttcggtaatagctacatatcctactgggcttactggggccaagggactctggtcaccgtctcctcaggtggtggtggttctggcggcggcggctccggtggtggtggttctcagactgttgtgactcaggaaccttcactcaccgtatcacctggtggaacagtcacactcacttgtggctcctcgactggggctgttacatctggcaactacccaaactgggtccaacaaaaaccaggtcaggcaccccgtggtctaataggtgggactaagttcctcgcccccggtactcctgccagattctcaggctccctgcttggaggcaaggctgccctcaccctctcaggggtacagccagaggatgaggcagaatattactgtgttctatggtacagcaaccgctgggtgttcggtggaggaaccaaactgactgtccta

SEQ ID NO: 339 - protein, 500 aa, Artificial Sequence
  MCSP-G10 HL x I2C HL
QVQLVQSGAEVKRPGASMKVSCKASGYTFTNYYIHWVRQAPGQGLEWMGWINPNSGATNYAQKFQGRVTMTRDTSTSTVYMELSSLRSEDTAVYYCAKSWVSWFASWGQGTLVTVSSGGGGSGGGGSGGGGSDIVMTQSPDSLAVSLGERATINCKSSQSVLSSSNNKNYLNWYQQKPGQPPKLLIYWASTRESGVPDRFSGSGSGTDFTLTISSLQAEDVAVYYCQQHFNTPFAFGQGTKLEIKSGGGGSEVQLVESGGGLVQPGGSLKLSCAASGFTFNKYAMNWVRQAPGKGLEWVARIRSKYNNYATYYADSVKDRFTISRDDSKNTAYLQMNNLKTEDTAVYYCVRHGNFGNSYISYWAYWGQGTLVTVSSGGGGSGGGGSGGGGSQTVVTQEPSLTVSPGGTVTLTCGSSTGAVTSGNYPNWVQQKPGQAPRGLIGGTKFLAPGTPARFSGSLLGGKAALTLSGVQPEDEAEYYCVLWYSNRWVFGGGTKLTVL

SEQ ID NO: 340 - DNA, 1500 bp, Artificial Sequence
  MCSP-G10 HL x I2C HL
caggtgcagctggtccagtctggggctgaggtgaagaggcctggggcctcaatgaaggtctcctgcaaggcttctgggtacaccttcaccaactactatatacactgggtgcgacaggcccctggacaaggtcttgagtggatgggttggatcaaccctaacagtggtgccacaaactatgcacagaagttccagggcagagtcaccatgaccagggacacgtccacgagcacagtctacatggagctgagcagcctgagatctgaggacacggccgtgtattactgtgcgaaatcctgggtctcctggtttgcttcctggggtcaaggaaccttggtcaccgtctcctcaggtggtggtggttctggcggcggcggctccggtggtggtggttctgacatcgtgatgacacagtctccagactccctggctgtgtctctgggcgagagggccaccatcaactgcaagtccagccagagtgtcttatccagctccaacaataagaactacttaaattggtaccagcagaaaccaggacagcctcctaagttgctcatttactgggcatctacccgggaatccggggtccctgaccgattcagtggcagcgggtctgggacagatttcactctcaccatcagcagcctgcaggctgaagatgtggcggtttattactgtcaacaacattttaatactccgttcgcttttggccaggggaccaagctggagatcaaatccggaggtggtggatccgaggtgcagctggtcgagtctggaggaggattggtgcagcctggagggtcattgaaactctcatgtgcagcctctggattcaccttcaataagtacgccatgaactgggtccgccaggctccaggaaagggtttggaatgggttgctcgcataagaagtaaatataataattatgcaacatattatgccgattcagtgaaagacaggttcaccatctccagagatgattcaaaaaacactgcctatctacaaatgaacaacttgaaaactgaggacactgccgtgtactactgtgtgagacatgggaacttcggtaatagctacatatcctactgggcttactggggccaagggactctggtcaccgtctcctcaggtggtggtggttctggcggcggcggctccggtggtggtggttctcagactgttgtgactcaggaaccttcactcaccgtatcacctggtggaacagtcacactcacttgtggctcctcgactggggctgttacatctggcaactacccaaactgggtccaacaaaaaccaggtcaggcaccccgtggtctaataggtgggactaagttcctcgcccccggtactcctgccagattctcaggctccctgcttggaggcaaggctgccctcaccctctcaggggtacagccagaggatgaggcagaatattactgtgttctatggtacagcaaccgctgggtgttcggtggaggaaccaaactgactgtccta

SEQ ID NO: 341 - protein, 8 aa, Homo sapiens
QDGNEEMG

SEQ ID NO: 342 - protein, 8 aa, Saimiri sciureus
QDGNEEIG

SEQ ID NO: 343 - DNA, 20 bp, Artificial Sequence
  Thioate-modified CpG-Oligonucleotide
tccatgacgttcctgatgct

SEQ ID NO: 344 - DNA, 28 bp, Artificial Sequence
  MVH1
gcaggtgcagctcgaggagtcaggacct

SEQ ID NO: 345 - DNA, 27 bp, Artificial Sequence
  MVH2
gaggtccagctcgagcagtctggacct

SEQ ID NO: 346 - DNA, 27 bp, Artificial Sequence
  MVH3
caggtccaactcgagcagcctggggct

SEQ ID NO: 347 - DNA, 27 bp, Artificial Sequence
  MVH4
gaggttcagctcgagcagtctggggca

SEQ ID NO: 348 - DNA, 28 bp, Artificial Sequence
  MVH5
gaaggtgaagctcgaggagtctggagga

SEQ ID NO: 349 - DNA, 27 bp, Artificial Sequence
  MVH6
gaggtgaagcttctcgagtctggaggt

SEQ ID NO: 350 - DNA, 27 bp, Artificial Sequence
  MVH7
gaagtgaagctcgaggagtctggggga

SEQ ID NO: 351 - DNA, 27 bp, Artificial Sequence
  MVH8
gaggttcagctcgagcagtctggagct

SEQ ID NO: 352 - DNA, 34 bp, Artificial Sequence
  MuVHBstEII
tgaggagacggtgaccgtggtcccttggccccag

SEQ ID NO: 353 - DNA, 32 bp, Artificial Sequence
  MUVK1
ccagttccgagctcgttgtgactcaggaatct

SEQ ID NO: 354 - DNA, 32 bp, Artificial Sequence
  MUVK2
ccagttccgagctcgtgttgacgcagccgccc

SEQ ID NO: 355 - DNA, 32 bp, Artificial Sequence
  MUVK3
ccagttccgagctcgtgctcacccagtctcca

SEQ ID NO: 356 - DNA, 32 bp, Artificial Sequence
  MUVK4
ccagttccgagctccagatgacccagtctcca

SEQ ID NO: 357 - DNA, 32 bp, Artificial Sequence
  MUVK5
ccagatgtgagctcgtgatgacccagactcca

SEQ ID NO: 358 - DNA, 32 bp, Artificial Sequence
  MUVK6
ccagatgtgagctcgtcatgacccagtctcca

SEQ ID NO: 359 - DNA, 32 bp, Artificial Sequence
  MUVK7
ccagttccgagctcgtgatgacacagtctcca

SEQ ID NO: 360 - DNA, 39 bp, Artificial Sequence
  MuVkHindIII/BsiW1
tggtgcactagtcgtacgtttgatctcaagcttggtccc

SEQ ID NO: 361 - DNA, 22 bp, Artificial Sequence
  forward primer
gatctggtctacaccatcgagc

SEQ ID NO: 362 - DNA, 24 bp, Artificial Sequence
  reverse primer
ggagctgctgctggctcagtgagg

SEQ ID NO: 363 - DNA, 23 bp, Artificial Sequence
  forward primer
ttccagctgagcatgtctgatgg

SEQ ID NO: 364 - DNA, 21 bp, Artificial Sequence
  reverse primer
cgatcagcatctgggcccagg

SEQ ID NO: 365 - DNA, 25 bp, Artificial Sequence
  forward primer
gtggagcagttcactcagcaggacc

SEQ ID NO: 366 - DNA, 22 bp, Artificial Sequence
  reverse primer
gccttcacacccagtactggcc

SEQ ID NO: 367 - DNA, 59 bp, Artificial Sequence
  forward primer
tcccgtacgagatctggatcccaattggatggcggactcgtgctgttctcacacagagg

SEQ ID NO: 368 - DNA, 45 bp, Artificial Sequence
  reverse primer
agtgggtcgactcacacccagtactggccattcttaagggcaggg

SEQ ID NO: 369 - DNA, 64 bp, Artificial Sequence
  forward primer
gaggaattcaccatgccgctgctgctactgctgcccctgctgtgggcaggggccctggctatgg

SEQ ID NO: 370 - DNA, 26 bp, Artificial Sequence
  reverse primer
gatttgtaactgtatttggtacttcc

SEQ ID NO: 371 - DNA, 21 bp, Artificial Sequence
  forward primer
attccgcctccttggggatcc

SEQ ID NO: 372 - DNA, 25 bp, Artificial Sequence
  reverse primer
gcataggagacattgagctggatgg

SEQ ID NO: 373 - DNA, 21 bp, Artificial Sequence
  forward primer
gcaccaacctgacctgtcagg

SEQ ID NO: 374 - DNA, 39 bp, Artificial Sequence
  reverse primer
agtgggtcgactcactgggtcctgacctctgagtattcg

SEQ ID NO: 375 - protein, 106 aa, Artificial Sequence
  PSCA-1 VL
DIQLTQSPSSLSASVGDRVTITCSASSSVRFIHWYQQKPGKAPKRLIYDTSKLASGVPSRFSGSGSGTDFTLTISSLQPEDFATYYCQQWSSSPFTFGQGTKVEIK

SEQ ID NO: 376 - DNA, 318 bp, Artificial Sequence
  PSCA-1 VL
gacatccagctgacccagagcccatccagcctgtctgctagcgtgggcgacagagtgaccatcacctgcagcgccagcagcagcgtgcggttcatccactggtatcagcagaagcccggcaaggcccccaagaggctgatctacgacaccagcaagctggctagcggcgtgccaagcagattcagcggcagcggctccggcaccgacttcaccctgaccatcagcagcctgcagccagaggacttcgctacctattactgccagcagtggagcagcagccccttcaccttcggccagggcaccaaggtggagatcaag

SEQ ID NO: 377 - protein, 10 aa, Artificial Sequence
  PSCA-1 LCDR1
SASSSVRFIH

SEQ ID NO: 378 - protein, 7 aa, Artificial Sequence
  PSCA-1 LCDR2
DTSKLAS

SEQ ID NO: 379 - protein, 9 aa, Artificial Sequence
  PSCA-1 LCDR3
QQWSSSPFT

SEQ ID NO: 380 - protein, 112 aa, Artificial Sequence
  PSCA-1 H
EVQLVESGGGLVQPGGSLRLSCAASGFNIKDYYIHWVRQAPGKGLEWVAWIDPENGDTEFVPKFQGRATISADTSKNTAYLQMNSLRAEDTAVYYCKTGGFWGQGTLVTVSS

SEQ ID NO: 381 - DNA, 336 bp, Artificial Sequence
  PSCA-1 H
gaggtgcagctggtcgagtctggcggaggactggtgcagccaggcggctccctgagactgagctgcgccgccagcggcttcaacatcaaggactactacatccactgggtccggcaggctccaggcaagggactggaatgggtggcctggatcgacccagagaacggcgacaccgagttcgtgcccaagttccagggcagagccaccatcagcgccgacacctccaagaacaccgcctacctgcagatgaacagcctgagggccgaggacaccgccgtgtactactgcaagaccggcggcttctggggacagggcaccctggtcaccgtgtcctcc

SEQ ID NO: 382 - protein, 5 aa, Artificial Sequence
  PSCA-1 HCDR1
DYYIH

SEQ ID NO: 383 - protein, 17 aa, Artificial Sequence
  PSCA-1 HCDR2
WIDPENGDTEFVPKFQG

SEQ ID NO: 384 - protein, 3 aa, Artificial Sequence
  PSCA-1 HCDR3
GGF

SEQ ID NO: 385 - protein, 233 aa, Artificial Sequence
  PSCA-1 HL
EVQLVESGGGLVQPGGSLRLSCAASGFNIKDYYIHWVRQAPGKGLEWVAWIDPENGDTEFVPKFQGRATISADTSKNTAYLQMNSLRAEDTAVYYCKTGGFWGQGTLVTVSSGGGGSGGGGSGGGGSDIQLTQSPSSLSASVGDRVTITCSASSSVRFIHWYQQKPGKAPKRLIYDTSKLASGVPSRFSGSGSGTDFTLTISSLQPEDFATYYCQQWSSSPFTFGQGTKVEIK

SEQ ID NO: 386 - DNA, 699 bp, Artificial Sequence
  PSCA-1 HL
gaggtgcagctggtcgagtctggcggaggactggtgcagccaggcggctccctgagactgagctgcgccgccagcggcttcaacatcaaggactactacatccactgggtccggcaggctccaggcaagggactggaatgggtggcctggatcgacccagagaacggcgacaccgagttcgtgcccaagttccagggcagagccaccatcagcgccgacacctccaagaacaccgcctacctgcagatgaacagcctgagggccgaggacaccgccgtgtactactgcaagaccggcggcttctggggacagggcaccctggtcaccgtgtcctccggtggtggtggttctggcggcggcggctccggtggtggtggttctgacatccagctgacccagagcccatccagcctgtctgctagcgtgggcgacagagtgaccatcacctgcagcgccagcagcagcgtgcggttcatccactggtatcagcagaagcccggcaaggcccccaagaggctgatctacgacaccagcaagctggctagcggcgtgccaagcagattcagcggcagcggctccggcaccgacttcaccctgaccatcagcagcctgcagccagaggacttcgctacctattactgccagcagtggagcagcagccccttcaccttcggccagggcaccaaggtggagatcaag

SEQ ID NO: 387 - protein, 233 aa, Artificial Sequence
  PSCA-1 LH
DIQLTQSPSSLSASVGDRVTITCSASSSVRFIHWYQQKPGKAPKRLIYDTSKLASGVPSRFSGSGSGTDFTLTISSLQPEDFATYYCQQWSSSPFTFGQGTKVEIKGGGGSGGGGSGGGGSEVQLVESGGGLVQPGGSLRLSCAASGFNIKDYYIHWVRQAPGKGLEWVAWIDPENGDTEFVPKFQGRATISADTSKNTAYLQMNSLRAEDTAVYYCKTGGFWGQGTLVTVSS

SEQ ID NO: 388 - DNA, 699 bp, Artificial Sequence
  PSCA-1 LH
gacatccagctgacccagagcccatccagcctgtctgctagcgtgggcgacagagtgaccatcacctgcagcgccagcagcagcgtgcggttcatccactggtatcagcagaagcccggcaaggcccccaagaggctgatctacgacaccagcaagctggctagcggcgtgccaagcagattcagcggcagcggctccggcaccgacttcaccctgaccatcagcagcctgcagccagaggacttcgctacctattactgccagcagtggagcagcagccccttcaccttcggccagggcaccaaggtggagatcaagggtggtggtggttctggcggcggcggctccggtggtggtggttctgaggtgcagctggtcgagtctggcggaggactggtgcagccaggcggctccctgagactgagctgcgccgccagcggcttcaacatcaaggactactacatccactgggtccggcaggctccaggcaagggactggaatgggtggcctggatcgacccagagaacggcgacaccgagttcgtgcccaagttccagggcagagccaccatcagcgccgacacctccaagaacaccgcctacctgcagatgaacagcctgagggccgaggacaccgccgtgtactactgcaagaccggcggcttctggggacagggcaccctggtcaccgtgtcctcc

SEQ ID NO: 389 - protein, 488 aa, Artificial Sequence
  PSCA-1 HL x I2C HL
EVQLVESGGGLVQPGGSLRLSCAASGFNIKDYYIHWVRQAPGKGLEWVAWIDPENGDTEFVPKFQGRATISADTSKNTAYLQMNSLRAEDTAVYYCKTGGFWGQGTLVTVSSGGGGSGGGGSGGGGSDIQLTQSPSSLSASVGDRVTITCSASSSVRFIHWYQQKPGKAPKRLIYDTSKLASGVPSRFSGSGSGTDFTLTISSLQPEDFATYYCQQWSSSPFTFGQGTKVEIKSGGGGSEVQLVESGGGLVQPGGSLKLSCAASGFTFNKYAMNWVRQAPGKGLEWVARIRSKYNNYATYYADSVKDRFTISRDDSKNTAYLQMNNLKTEDTAVYYCVRHGNFGNSYISYWAYWGQGTLVTVSSGGGGSGGGGSGGGGSQTVVTQEPSLTVSPGGTVTLTCGSSTGAVTSGNYPNWVQQKPGQAPRGLIGGTKFLAPGTPARFSGSLLGGKAALTLSGVQPEDEAEYYCVLWYSNRWVFGGGTKLTVL

SEQ ID NO: 390 - DNA, 1464 bp, Artificial Sequence
  PSCA-1 HL x I2C HL
gaggtgcagctggtcgagtctggcggaggactggtgcagccaggcggctccctgagactgagctgcgccgccagcggcttcaacatcaaggactactacatccactgggtccggcaggctccaggcaagggactggaatgggtggcctggatcgacccagagaacggcgacaccgagttcgtgcccaagttccagggcagagccaccatcagcgccgacacctccaagaacaccgcctacctgcagatgaacagcctgagggccgaggacaccgccgtgtactactgcaagaccggcggcttctggggacagggcaccctggtcaccgtgtcctccggtggtggtggttctggcggcggcggctccggtggtggtggttctgacatccagctgacccagagcccatccagcctgtctgctagcgtgggcgacagagtgaccatcacctgcagcgccagcagcagcgtgcggttcatccactggtatcagcagaagcccggcaaggcccccaagaggctgatctacgacaccagcaagctggctagcggcgtgccaagcagattcagcggcagcggctccggcaccgacttcaccctgaccatcagcagcctgcagccagaggacttcgctacctattactgccagcagtggagcagcagccccttcaccttcggccagggcaccaaggtggagatcaagtccggaggtggtggatccgaggtgcagctggtcgagtctggaggaggattggtgcagcctggagggtcattgaaactctcatgtgcagcctctggattcaccttcaataagtacgccatgaactgggtccgccaggctccaggaaagggtttggaatgggttgctcgcataagaagtaaatataataattatgcaacatattatgccgattcagtgaaagacaggttcaccatctccagagatgattcaaaaaacactgcctatctacaaatgaacaacttgaaaactgaggacactgccgtgtactactgtgtgagacatgggaacttcggtaatagctacatatcctactgggcttactggggccaagggactctggtcaccgtctcctcaggtggtggtggttctggcggcggcggctccggtggtggtggttctcagactgttgtgactcaggaaccttcactcaccgtatcacctggtggaacagtcacactcacttgtggctcctcgactggggctgttacatctggcaactacccaaactgggtccaacaaaaaccaggtcaggcaccccgtggtctaataggtgggactaagttcctcgcccccggtactcctgccagattctcaggctccctgcttggaggcaaggctgccctcaccctctcaggggtacagccagaggatgaggcagaatattactgtgttctatggtacagcaaccgctgggtgttcggtggaggaaccaaactgactgtccta

SEQ ID NO: 391 - protein, 487 aa, Artificial Sequence
  PSCA-1 LH x I2C HL
DIQLTQSPSSLSASVGDRVTITCSASSSVRFIHWYQQKPGKAPKRLIYDTSKLASGVPSRFSGSGSGTDFTLTISSLQPEDFATYYCQQWSSSPFTFGQGTKVEIKGGGGSGGGGSGGGGSEVQLVESGGGLVQPGGSLRLSCAASGFNIKDYYIHWVRQAPGKGLEWVAWIDPENGDTEFVPKFQGRATISADTSKNTAYLQMNSLRAEDTAVYYCKTGGFWGQGTLVTVSSGGGGSEVQLVESGGGLVQPGGSLKLSCAASGFTFNKYAMNWVRQAPGKGLEWVARIRSKYNNYATYYADSVKDRFTISRDDSKNTAYLQMNNLKTEDTAVYYCVRHGNFGNSYISYWAYWGQGTLVTVSSGGGGSGGGGSGGGGSQTVVTQEPSLTVSPGGTVTLTCGSSTGAVTSGNYPNWVQQKPGQAPRGLIGGTKFLAPGTPARFSGSLLGGKAALTLSGVQPEDEAEYYCVLWYSNRWVFGGGTKLTVL

SEQ ID NO: 392 - DNA, 1461 bp, Artificial Sequence
  PSCA-1 LH x I2C HL
gacatccagctgacccagagcccatccagcctgtctgctagcgtgggcgacagagtgaccatcacctgcagcgccagcagcagcgtgcggttcatccactggtatcagcagaagcccggcaaggcccccaagaggctgatctacgacaccagcaagctggctagcggcgtgccaagcagattcagcggcagcggctccggcaccgacttcaccctgaccatcagcagcctgcagccagaggacttcgctacctattactgccagcagtggagcagcagccccttcaccttcggccagggcaccaaggtggagatcaagggtggtggtggttctggcggcggcggctccggtggtggtggttctgaggtgcagctggtcgagtctggcggaggactggtgcagccaggcggctccctgagactgagctgcgccgccagcggcttcaacatcaaggactactacatccactgggtccggcaggctccaggcaagggactggaatgggtggcctggatcgacccagagaacggcgacaccgagttcgtgcccaagttccagggcagagccaccatcagcgccgacacctccaagaacaccgcctacctgcagatgaacagcctgagggccgaggacaccgccgtgtactactgcaagaccggcggcttctggggacagggcaccctggtcaccgtgtcctccggaggtggtggatccgaggtgcagctggtcgagtctggaggaggattggtgcagcctggagggtcattgaaactctcatgtgcagcctctggattcaccttcaataagtacgccatgaactgggtccgccaggctccaggaaagggtttggaatgggttgctcgcataagaagtaaatataataattatgcaacatattatgccgattcagtgaaagacaggttcaccatctccagagatgattcaaaaaacactgcctatctacaaatgaacaacttgaaaactgaggacactgccgtgtactactgtgtgagacatgggaacttcggtaatagctacatatcctactgggcttactggggccaagggactctggtcaccgtctcctcaggtggtggtggttctggcggcggcggctccggtggtggtggttctcagactgttgtgactcaggaaccttcactcaccgtatcacctggtggaacagtcacactcacttgtggctcctcgactggggctgttacatctggcaactacccaaactgggtccaacaaaaaccaggtcaggcaccccgtggtctaataggtgggactaagttcctcgcccccggtactcctgccagattctcaggctccctgcttggaggcaaggctgccctcaccctctcaggggtacagccagaggatgaggcagaatattactgtgttctatggtacagcaaccgctgggtgttcggtggaggaaccaaactgactgtccta

SEQ ID NO: 393 - protein, 112 aa, Artificial Sequence
  PSCA-2 VL
DIVMTQAAPSVPVTPGESVSISCRSSKSLLHSNGNTYLYWFLQRPGQSPQLLIYRMSNLASGVPDRFSGSGSGTAFTLRISRVEAEDVGVYYCLQHLEYPYTFGGGTKLELK

SEQ ID NO: 394 - DNA, 336 bp, Artificial Sequence
  PSCA-2 VL
gacatcgtgatgacccaggccgctccaagcgtgccagtgaccccaggcgagagcgtgtccatcagctgcaggtccagcaagagcctgctgcacagcaacggcaacacctacctgtactggtttctgcagaggccaggccagagcccccagctgctgatctacaggatgagcaacctggctagcggcgtgccagacagattcagcggcagcggctctggaaccgccttcaccctgaggatcagcagggtggaggccgaggacgtgggcgtgtactactgcctgcagcacctggaatacccctacaccttcggcggagggaccaagctggaactgaag

SEQ ID NO: 395 - protein, 16 aa, Artificial Sequence
  PSCA-2 LCDR1
RSSKSLLHSNGNTYLY

SEQ ID NO: 396 - protein, 7 aa, Artificial Sequence
  PSCA-2 LCDR2
RMSNLAS

SEQ ID NO: 397 - protein, 9 aa, Artificial Sequence
  PSCA-2 LCDR3
LQHLEYPYT

SEQ ID NO: 398 - protein, 117 aa, Artificial Sequence
  PSCA-2 H
QVQVQQPGAELVKPGAPVKLSCKASGYTFTNYWLNWVKQRPGRGLEWIGRIDPSDSEIHYDQKFKDKATLTVDKSSSTAYIQLSSLTSEDSAVYYCALTGIYAMAYWGQGTSVTVSS

SEQ ID NO: 399 - DNA, 351 bp, Artificial Sequence
  PSCA-2 H
caggtgcaggtgcagcagccaggcgccgaactggtcaagcctggcgccccagtgaagctgtcctgcaaggccagcggctacaccttcaccaactactggctgaactgggtgaaacagaggcccggcaggggcctggaatggatcggcaggatcgaccccagcgacagcgagatccactacgaccagaagttcaaggacaaggccaccctgaccgtggacaagagcagcagcaccgcctacatccagctgtccagcctgaccagcgaggacagcgccgtgtactattgcgccctgaccggcatctacgccatggcctactggggccagggcaccagcgtgaccgtgtcttcc

SEQ ID NO: 400 - protein, 5 aa, Artificial Sequence
  PSCA-2 HCDR1
NYWLN

SEQ ID NO: 401 - protein, 17 aa, Artificial Sequence
  PSCA-2 HCDR2
RIDPSDSEIHYDQKFKD

SEQ ID NO: 402 - protein, 8 aa, Artificial Sequence
  PSCA-2 HCDR3
TGIYAMAY

SEQ ID NO: 403 - protein, 244 aa, Artificial Sequence
  PSCA-2 LH
DIVMTQAAPSVPVTPGESVSISCRSSKSLLHSNGNTYLYWFLQRPGQSPQLLIYRMSNLASGVPDRFSGSGSGTAFTLRISRVEAEDVGVYYCLQHLEYPYTFGGGTKLELKGGGGSGGGGSGGGGSQVQVQQPGAELVKPGAPVKLSCKASGYTFTNYWLNWVKQRPGRGLEWIGRIDPSDSEIHYDQKFKDKATLTVDKSSSTAYIQLSSLTSEDSAVYYCALTGIYAMAYWGQGTSVTVSS

SEQ ID NO: 404 - DNA, 732 bp, Artificial Sequence
  PSCA-2 LH
gacatcgtgatgacccaggccgctccaagcgtgccagtgaccccaggcgagagcgtgtccatcagctgcaggtccagcaagagcctgctgcacagcaacggcaacacctacctgtactggtttctgcagaggccaggccagagcccccagctgctgatctacaggatgagcaacctggctagcggcgtgccagacagattcagcggcagcggctctggaaccgccttcaccctgaggatcagcagggtggaggccgaggacgtgggcgtgtactactgcctgcagcacctggaatacccctacaccttcggcggagggaccaagctggaactgaagggtggtggtggttctggcggcggcggctccggtggtggtggttctcaggtgcaggtgcagcagccaggcgccgaactggtcaagcctggcgccccagtgaagctgtcctgcaaggccagcggctacaccttcaccaactactggctgaactgggtgaaacagaggcccggcaggggcctggaatggatcggcaggatcgaccccagcgacagcgagatccactacgaccagaagttcaaggacaaggccaccctgaccgtggacaagagcagcagcaccgcctacatccagctgtccagcctgaccagcgaggacagcgccgtgtactattgcgccctgaccggcatctacgccatggcctactggggccagggcaccagcgtgaccgtgtcttcc

SEQ ID NO: 405 - protein, 498 aa, Artificial Sequence
  PSCA-2 LH x I2C HL
DIVMTQAAPSVPVTPGESVSISCRSSKSLLHSNGNTYLYWFLQRPGQSPQLLIYRMSNLASGVPDRFSGSGSGTAFTLRISRVEAEDVGVYYCLQHLEYPYTFGGGTKLELKGGGGSGGGGSGGGGSQVQVQQPGAELVKPGAPVKLSCKASGYTFTNYWLNWVKQRPGRGLEWIGRIDPSDSEIHYDQKFKDKATLTVDKSSSTAYIQLSSLTSEDSAVYYCALTGIYAMAYWGQGTSVTVSSGGGGSEVQLVESGGGLVQPGGSLKLSCAASGFTFNKYAMNWVRQAPGKGLEWVARIRSKYNNYATYYADSVKDRFTISRDDSKNTAYLQMNNLKTEDTAVYYCVRHGNFGNSYISYWAYWGQGTLVTVSSGGGGSGGGGSGGGGSQTVVTQEPSLTVSPGGTVTLTCGSSTGAVTSGNYPNWVQQKPGQAPRGLIGGTKFLAPGTPARFSGSLLGGKAALTLSGVQPEDEAEYYCVLWYSNRWVFGGGTKLTVL

SEQ ID NO: 406 - DNA, 1494 bp, Artificial Sequence
  PSCA-2 LH x I2C HL
gacatcgtgatgacccaggccgctccaagcgtgccagtgaccccaggcgagagcgtgtccatcagctgcaggtccagcaagagcctgctgcacagcaacggcaacacctacctgtactggtttctgcagaggccaggccagagcccccagctgctgatctacaggatgagcaacctggctagcggcgtgccagacagattcagcggcagcggctctggaaccgccttcaccctgaggatcagcagggtggaggccgaggacgtgggcgtgtactactgcctgcagcacctggaatacccctacaccttcggcggagggaccaagctggaactgaagggtggtggtggttctggcggcggcggctccggtggtggtggttctcaggtgcaggtgcagcagccaggcgccgaactggtcaagcctggcgccccagtgaagctgtcctgcaaggccagcggctacaccttcaccaactactggctgaactgggtgaaacagaggcccggcaggggcctggaatggatcggcaggatcgaccccagcgacagcgagatccactacgaccagaagttcaaggacaaggccaccctgaccgtggacaagagcagcagcaccgcctacatccagctgtccagcctgaccagcgaggacagcgccgtgtactattgcgccctgaccggcatctacgccatggcctactggggccagggcaccagcgtgaccgtgtcttccggaggtggtggatccgaggtgcagctggtcgagtctggaggaggattggtgcagcctggagggtcattgaaactctcatgtgcagcctctggattcaccttcaataagtacgccatgaactgggtccgccaggctccaggaaagggtttggaatgggttgctcgcataagaagtaaatataataattatgcaacatattatgccgattcagtgaaagacaggttcaccatctccagagatgattcaaaaaacactgcctatctacaaatgaacaacttgaaaactgaggacactgccgtgtactactgtgtgagacatgggaacttcggtaatagctacatatcctactgggcttactggggccaagggactctggtcaccgtctcctcaggtggtggtggttctggcggcggcggctccggtggtggtggttctcagactgttgtgactcaggaaccttcactcaccgtatcacctggtggaacagtcacactcacttgtggctcctcgactggggctgttacatctggcaactacccaaactgggtccaacaaaaaccaggtcaggcaccccgtggtctaataggtgggactaagttcctcgcccccggtactcctgccagattctcaggctccctgcttggaggcaaggctgccctcaccctctcaggggtacagccagaggatgaggcagaatattactgtgttctatggtacagcaaccgctgggtgttcggtggaggaaccaaactgactgtccta

SEQ ID NO: 407 - protein, 112 aa, Artificial Sequence
  PSCA-3 VL
DVVMTQTPLTLSVTIGQPASISCKSSQSLLDSDGKTYLNWLLQRPGQSPKRLIYLVSTLDSGVPDRFTGSGSGTDFTLKISRVEAEDLGVYYCWQGTHFPRTFGGGTKLEIK

SEQ ID NO: 408 - DNA, 336 bp, Artificial Sequence
  PSCA-3 VL
gacgtggtcatgacccagacccccctgaccctgagcgtgaccatcggccagccagccagcatctcttgcaagtccagccagtccctgctggacagcgacggcaagacctacctgaactggctgctgcagaggccaggccagagccccaagaggctgatctacctggtgtccaccctggacagcggcgtgccagacagattcaccggcagcggctccggcaccgacttcaccctgaagatcagcagggtggaggccgaggacctgggcgtgtactactgctggcagggcacccacttcccaaggaccttcggcggagggaccaagctggaaatcaag

SEQ ID NO: 409 - protein, 16 aa, Artificial Sequence
  PSCA-3 LCDR1
KSSQSLLDSDGKTYLN

SEQ ID NO: 410 - protein, 7 aa, Artificial Sequence
  PSCA-3 LCDR2
LVSTLDS

SEQ ID NO: 411 - protein, 9 aa, Artificial Sequence
  PSCA-3 LCDR3
WQGTHFPRT

SEQ ID NO: 412 - protein, 114 aa, Artificial Sequence
  PSCA-3 H
EVQLQQSGPDLEKPGASVKISCKPSGNSFTGYYIHWVKQSHGKSLEWIGRVDPNNGFTSYNQKFKGKAILTVDKSSSTAYMELRSLTSEDSAVYYCVGNFFDSWGQGTTLTVSS

SEQ ID NO: 413 - DNA, 342 bp, Artificial Sequence
  PSCA-3 H
gaagtgcagctgcagcagagcggcccagacctggaaaagccaggcgccagcgtgaagatttcctgcaagcccagcggcaacagcttcaccggctactacatccactgggtgaaacagtcccacgggaagagcctggaatggatcggcagagtggaccccaacaacggcttcacctcctacaaccagaagttcaagggcaaggccatcctgaccgtggacaagagcagcagcaccgcctacatggaactgagaagcctgaccagcgaggacagcgccgtgtactattgcgtgggcaacttcttcgacagctggggccagggaaccacactgaccgtgtcctcc

SEQ ID NO: 414 - protein, 5 aa, Artificial Sequence
  PSCA-3 HCDR1
GYYIH

SEQ ID NO: 415 - protein, 17 aa, Artificial Sequence
  PSCA-3 HCDR2
RVDPNNGFTSYNQKFKG

SEQ ID NO: 416 - protein, 5 aa, Artificial Sequence
  PSCA-3 HCDR3
NFFDS

SEQ ID NO: 417 - protein, 241 aa, Artificial Sequence
  PSCA-3 HL
EVQLQQSGPDLEKPGASVKISCKPSGNSFTGYYIHWVKQSHGKSLEWIGRVDPNNGFTSYNQKFKGKAILTVDKSSSTAYMELRSLTSEDSAVYYCVGNFFDSWGQGTTLTVSSGGGGSGGGGSGGGGSDVVMTQTPLTLSVTIGQPASISCKSSQSLLDSDGKTYLNWLLQRPGQSPKRLIYLVSTLDSGVPDRFTGSGSGTDFTLKISRVEAEDLGVYYCWQGTHFPRTFGGGTKLEIK

SEQ ID NO: 418 - DNA, 723 bp, Artificial Sequence
  PSCA-3 HL
gaagtgcagctgcagcagagcggcccagacctggaaaagccaggcgccagcgtgaagatttcctgcaagcccagcggcaacagcttcaccggctactacatccactgggtgaaacagtcccacgggaagagcctggaatggatcggcagagtggaccccaacaacggcttcacctcctacaaccagaagttcaagggcaaggccatcctgaccgtggacaagagcagcagcaccgcctacatggaactgagaagcctgaccagcgaggacagcgccgtgtactattgcgtgggcaacttcttcgacagctggggccagggaaccacactgaccgtgtcctccggtggtggtggttctggcggcggcggctccggtggtggtggttctgacgtggtcatgacccagacccccctgaccctgagcgtgaccatcggccagccagccagcatctcttgcaagtccagccagtccctgctggacagcgacggcaagacctacctgaactggctgctgcagaggccaggccagagccccaagaggctgatctacctggtgtccaccctggacagcggcgtgccagacagattcaccggcagcggctccggcaccgacttcaccctgaagatcagcagggtggaggccgaggacctgggcgtgtactactgctggcagggcacccacttcccaaggaccttcggcggagggaccaagctggaaatcaag

SEQ ID NO: 419 - protein, 241 aa, Artificial Sequence
  PSCA-3 LH
DVVMTQTPLTLSVTIGQPASISCKSSQSLLDSDGKTYLNWLLQRPGQSPKRLIYLVSTLDSGVPDRFTGSGSGTDFTLKISRVEAEDLGVYYCWQGTHFPRTFGGGTKLEIKGGGGSGGGGSGGGGSEVQLQQSGPDLEKPGASVKISCKPSGNSFTGYYIHWVKQSHGKSLEWIGRVDPNNGFTSYNQKFKGKAILTVDKSSSTAYMELRSLTSEDSAVYYCVGNFFDSWGQGTTLTVSS

SEQ ID NO: 420 - protein, 723 aa, Artificial Sequence
  PSCA-3 LH
GACGTGGTCATGACCCAGACCCCCCTGACCCTGAGCGTGACCATCGGCCAGCCAGCCAGCATCTCTTGCAAGTCCAGCCAGTCCCTGCTGGACAGCGACGGCAAGACCTACCTGAACTGGCTGCTGCAGAGGCCAGGCCAGAGCCCCAAGAGGCTGATCTACCTGGTGTCCACCCTGGACAGCGGCGTGCCAGACAGATTCACCGGCAGCGGCTCCGGCACCGACTTCACCCTGAAGATCAGCAGGGTGGAGGCCGAGGACCTGGGCGTGTACTACTGCTGGCAGGGCACCCACTTCCCAAGGACCTTCGGCGGAGGGACCAAGCTGGAAATCAAGGGTGGTGGTGGTTCTGGCGGCGGCGGCTCCGGTGGTGGTGGTTCTGAAGTGCAGCTGCAGCAGAGCGGCCCAGACCTGGAAAAGCCAGGCGCCAGCGTGAAGATTTCCTGCAAGCCCAGCGGCAACAGCTTCACCGGCTACTACATCCACTGGGTGAAACAGTCCCACGGGAAGAGCCTGGAATGGATCGGCAGAGTGGACCCCAACAACGGCTTCACCTCCTACAACCAGAAGTTCAAGGGCAAGGCCATCCTGACCGTGGACAAGAGCAGCAGCACCGCCTACATGGAACTGAGAAGCCTGACCAGCGAGGACAGCGCCGTGTACTATTGCGTGGGCAACTTCTTCGACAGCTGGGGCCAGGGAACCACACTGACCGTGTCCTCC

SEQ ID NO: 421 - protein, 496 aa, Artificial Sequence
  PSCA-3 HL x I2C HL
EVQLQQSGPDLEKPGASVKISCKPSGNSFTGYYIHWVKQSHGKSLEWIGRVDPNNGFTSYNQKFKGKAILTVDKSSSTAYMELRSLTSEDSAVYYCVGNFFDSWGQGTTLTVSSGGGGSGGGGSGGGGSDVVMTQTPLTLSVTIGQPASISCKSSQSLLDSDGKTYLNWLLQRPGQSPKRLIYLVSTLDSGVPDRFTGSGSGTDFTLKISRVEAEDLGVYYCWQGTHFPRTFGGGTKLEIKSGGGGSEVQLVESGGGLVQPGGSLKLSCAASGFTFNKYAMNWVRQAPGKGLEWVARIRSKYNNYATYYADSVKDRFTISRDDSKNTAYLQMNNLKTEDTAVYYCVRHGNFGNSYISYWAYWGQGTLVTVSSGGGGSGGGGSGGGGSQTVVTQEPSLTVSPGGTVTLTCGSSTGAVTSGNYPNWVQQKPGQAPRGLIGGTKFLAPGTPARFSGSLLGGKAALTLSGVQPEDEAEYYCVLWYSNRWVFGGGTKLTVL

SEQ ID NO: 422 - DNA, 1488 bp, Artificial Sequence
  PSCA-3 HL x I2C HL
gaagtgcagctgcagcagagcggcccagacctggaaaagccaggcgccagcgtgaagatttcctgcaagcccagcggcaacagcttcaccggctactacatccactgggtgaaacagtcccacgggaagagcctggaatggatcggcagagtggaccccaacaacggcttcacctcctacaaccagaagttcaagggcaaggccatcctgaccgtggacaagagcagcagcaccgcctacatggaactgagaagcctgaccagcgaggacagcgccgtgtactattgcgtgggcaacttcttcgacagctggggccagggaaccacactgaccgtgtcctccggtggtggtggttctggcggcggcggctccggtggtggtggttctgacgtggtcatgacccagacccccctgaccctgagcgtgaccatcggccagccagccagcatctcttgcaagtccagccagtccctgctggacagcgacggcaagacctacctgaactggctgctgcagaggccaggccagagccccaagaggctgatctacctggtgtccaccctggacagcggcgtgccagacagattcaccggcagcggctccggcaccgacttcaccctgaagatcagcagggtggaggccgaggacctgggcgtgtactactgctggcagggcacccacttcccaaggaccttcggcggagggaccaagctggaaatcaagtccggaggtggtggatccgaggtgcagctggtcgagtctggaggaggattggtgcagcctggagggtcattgaaactctcatgtgcagcctctggattcaccttcaataagtacgccatgaactgggtccgccaggctccaggaaagggtttggaatgggttgctcgcataagaagtaaatataataattatgcaacatattatgccgattcagtgaaagacaggttcaccatctccagagatgattcaaaaaacactgcctatctacaaatgaacaacttgaaaactgaggacactgccgtgtactactgtgtgagacatgggaacttcggtaatagctacatatcctactgggcttactggggccaagggactctggtcaccgtctcctcaggtggtggtggttctggcggcggcggctccggtggtggtggttctcagactgttgtgactcaggaaccttcactcaccgtatcacctggtggaacagtcacactcacttgtggctcctcgactggggctgttacatctggcaactacccaaactgggtccaacaaaaaccaggtcaggcaccccgtggtctaataggtgggactaagttcctcgcccccggtactcctgccagattctcaggctccctgcttggaggcaaggctgccctcaccctctcaggggtacagccagaggatgaggcagaatattactgtgttctatggtacagcaaccgctgggtgttcggtggaggaaccaaactgactgtccta

SEQ ID NO: 423 - protein, 495 aa, Artificial Sequence
  PSCA-3 LH x I2C HL
DVVMTQTPLTLSVTIGQPASISCKSSQSLLDSDGKTYLNWLLQRPGQSPKRLIYLVSTLDSGVPDRFTGSGSGTDFTLKISRVEAEDLGVYYCWQGTHFPRTFGGGTKLEIKGGGGSGGGGSGGGGSEVQLQQSGPDLEKPGASVKISCKPSGNSFTGYYIHWVKQSHGKSLEWIGRVDPNNGFTSYNQKFKGKAILTVDKSSSTAYMELRSLTSEDSAVYYCVGNFFDSWGQGTTLTVSSGGGGSEVQLVESGGGLVQPGGSLKLSCAASGFTFNKYAMNWVRQAPGKGLEWVARIRSKYNNYATYYADSVKDRFTISRDDSKNTAYLQMNNLKTEDTAVYYCVRHGNFGNSYISYWAYWGQGTLVTVSSGGGGSGGGGSGGGGSQTVVTQEPSLTVSPGGTVTLTCGSSTGAVTSGNYPNWVQQKPGQAPRGLIGGTKFLAPGTPARFSGSLLGGKAALTLSGVQPEDEAEYYCVLWYSNRWVFGGGTKLTVL

SEQ ID NO: 424 - DNA, 1485 bp, Artificial Sequence
  PSCA-3 LH x I2C HL
gacgtggtcatgacccagacccccctgaccctgagcgtgaccatcggccagccagccagcatctcttgcaagtccagccagtccctgctggacagcgacggcaagacctacctgaactggctgctgcagaggccaggccagagccccaagaggctgatctacctggtgtccaccctggacagcggcgtgccagacagattcaccggcagcggctccggcaccgacttcaccctgaagatcagcagggtggaggccgaggacctgggcgtgtactactgctggcagggcacccacttcccaaggaccttcggcggagggaccaagctggaaatcaagggtggtggtggttctggcggcggcggctccggtggtggtggttctgaagtgcagctgcagcagagcggcccagacctggaaaagccaggcgccagcgtgaagatttcctgcaagcccagcggcaacagcttcaccggctactacatccactgggtgaaacagtcccacgggaagagcctggaatggatcggcagagtggaccccaacaacggcttcacctcctacaaccagaagttcaagggcaaggccatcctgaccgtggacaagagcagcagcaccgcctacatggaactgagaagcctgaccagcgaggacagcgccgtgtactattgcgtgggcaacttcttcgacagctggggccagggaaccacactgaccgtgtcctccggaggtggtggatccgaggtgcagctggtcgagtctggaggaggattggtgcagcctggagggtcattgaaactctcatgtgcagcctctggattcaccttcaataagtacgccatgaactgggtccgccaggctccaggaaagggtttggaatgggttgctcgcataagaagtaaatataataattatgcaacatattatgccgattcagtgaaagacaggttcaccatctccagagatgattcaaaaaacactgcctatctacaaatgaacaacttgaaaactgaggacactgccgtgtactactgtgtgagacatgggaacttcggtaatagctacatatcctactgggcttactggggccaagggactctggtcaccgtctcctcaggtggtggtggttctggcggcggcggctccggtggtggtggttctcagactgttgtgactcaggaaccttcactcaccgtatcacctggtggaacagtcacactcacttgtggctcctcgactggggctgttacatctggcaactacccaaactgggtccaacaaaaaccaggtcaggcaccccgtggtctaataggtgggactaagttcctcgcccccggtactcctgccagattctcaggctccctgcttggaggcaaggctgccctcaccctctcaggggtacagccagaggatgaggcagaatattactgtgttctatggtacagcaaccgctgggtgttcggtggaggaaccaaactgactgtccta

SEQ ID NO: 425 - protein, 106 aa, Artificial Sequence
  PSCA-4 VL
QVVLTQSPAIMSASPGEKVTMACSASSSVRFIHWYQQKSGTSPKRWIYDTSKLASGVPTRFSGSGSGTSYSLTISTMEAEDAATYYCQQWSSSPFTFGSGTKLIIK

SEQ ID NO: 426 - DNA, 318 bp, Artificial Sequence
  PSCA-4 VL
caggtggtgctgacccagagcccagccatcatgagcgccagcccaggcgagaaagtgaccatggcctgcagcgccagcagcagcgtgcggttcatccactggtatcagcagaagtccggcaccagccccaagagatggatctacgacaccagcaagctggctagcggcgtgccaaccagattcagcggaagcggctccggcacctcctacagcctgaccatcagcaccatggaagccgaggacgccgccacctactactgccagcagtggagcagcagccccttcaccttcggcagcggcaccaagctgatcatcaag

SEQ ID NO: 427 - protein, 10 aa, Artificial Sequence
  PSCA-4 LCDR1
SASSSVRFIH

SEQ ID NO: 428 - protein, 7 aa, Artificial Sequence
  PSCA-4 LCDR2
DTSKLAS

SEQ ID NO: 429 - protein, 9 aa, Artificial Sequence
  PSCA-4 LCDR3
QQWSSSPFT

SEQ ID NO: 430 - protein, 112 aa, Artificial Sequence
  PSCA-4 H
EVQLQQSGAELVRSGASVKLSCTASGFNIKDYYIHWVNQRPDQGLEWIGWIDPENGDTEFVPKFQGKATMTADIFSNTAYLHLSSLTSEDTAVYYCKTGGFWGQGTLVTVSS

SEQ ID NO: 431 - DNA, 336 bp, Artificial Sequence
  PSCA-4 H
gaagtgcagctgcagcagtctggagccgagctggtcagatctggagccagcgtgaagctgtcttgcaccgccagcggcttcaacatcaaggactactacatccactgggtgaaccagaggcccgaccagggcctggaatggatcggctggatcgaccccgagaacggcgacaccgagttcgtgcccaagttccagggcaaggccaccatgaccgccgacatcttcagcaacaccgcctacctgcacctgagcagcctgacctctgaggacaccgccgtgtactactgcaagaccggcggcttctggggacagggcaccctggtcaccgtgtcctcc

SEQ ID NO: 432 - protein, 5 aa, Artificial Sequence
  PSCA-4 HCDR1
DYYIH

SEQ ID NO: 433 - protein, 17 aa, Artificial Sequence
  PSCA-4 HCDR2
WIDPENGDTEFVPKFQG

SEQ ID NO: 434 - protein, 3 aa, Artificial Sequence
  PSCA-4 HCDR3
GGF

SEQ ID NO: 435 - protein, 233 aa, Artificial Sequence
  PSCA-4 HL
EVQLQQSGAELVRSGASVKLSCTASGFNIKDYYIHWVNQRPDQGLEWIGWIDPENGDTEFVPKFQGKATMTADIFSNTAYLHLSSLTSEDTAVYYCKTGGFWGQGTLVTVSSGGGGSGGGGSGGGGSQVVLTQSPAIMSASPGEKVTMACSASSSVRFIHWYQQKSGTSPKRWIYDTSKLASGVPTRFSGSGSGTSYSLTISTMEAEDAATYYCQQWSSSPFTFGSGTKLIIK

SEQ ID NO: 436 - DNA, 699 bp, Artificial Sequence
  PSCA-4 HL
gaagtgcagctgcagcagtctggagccgagctggtcagatctggagccagcgtgaagctgtcttgcaccgccagcggcttcaacatcaaggactactacatccactgggtgaaccagaggcccgaccagggcctggaatggatcggctggatcgaccccgagaacggcgacaccgagttcgtgcccaagttccagggcaaggccaccatgaccgccgacatcttcagcaacaccgcctacctgcacctgagcagcctgacctctgaggacaccgccgtgtactactgcaagaccggcggcttctggggacagggcaccctggtcaccgtgtcctccggtggtggtggttctggcggcggcggctccggtggtggtggttctcaggtggtgctgacccagagcccagccatcatgagcgccagcccaggcgagaaagtgaccatggcctgcagcgccagcagcagcgtgcggttcatccactggtatcagcagaagtccggcaccagccccaagagatggatctacgacaccagcaagctggctagcggcgtgccaaccagattcagcggaagcggctccggcacctcctacagcctgaccatcagcaccatggaagccgaggacgccgccacctactactgccagcagtggagcagcagccccttcaccttcggcagcggcaccaagctgatcatcaag

SEQ ID NO: 437 - protein, 233 aa, Artificial Sequence
  PSCA-4 LH
QVVLTQSPAIMSASPGEKVTMACSASSSVRFIHWYQQKSGTSPKRWIYDTSKLASGVPTRFSGSGSGTSYSLTISTMEAEDAATYYCQQWSSSPFTFGSGTKLIIKGGGGSGGGGSGGGGSEVQLQQSGAELVRSGASVKLSCTASGFNIKDYYIHWVNQRPDQGLEWIGWIDPENGDTEFVPKFQGKATMTADIFSNTAYLHLSSLTSEDTAVYYCKTGGFWGQGTLVTVSS

SEQ ID NO: 438 - DNA, 699 bp, Artificial Sequence
  PSCA-4 LH
caggtggtgctgacccagagcccagccatcatgagcgccagcccaggcgagaaagtgaccatggcctgcagcgccagcagcagcgtgcggttcatccactggtatcagcagaagtccggcaccagccccaagagatggatctacgacaccagcaagctggctagcggcgtgccaaccagattcagcggaagcggctccggcacctcctacagcctgaccatcagcaccatggaagccgaggacgccgccacctactactgccagcagtggagcagcagccccttcaccttcggcagcggcaccaagctgatcatcaagggtggtggtggttctggcggcggcggctccggtggtggtggttctgaagtgcagctgcagcagtctggagccgagctggtcagatctggagccagcgtgaagctgtcttgcaccgccagcggcttcaacatcaaggactactacatccactgggtgaaccagaggcccgaccagggcctggaatggatcggctggatcgaccccgagaacggcgacaccgagttcgtgcccaagttccagggcaaggccaccatgaccgccgacatcttcagcaacaccgcctacctgcacctgagcagcctgacctctgaggacaccgccgtgtactactgcaagaccggcggcttctggggacagggcaccctggtcaccgtgtcctcc

SEQ ID NO: 439 - protein, 488 aa, Artificial Sequence
  PSCA-4 HL x I2C HL
EVQLQQSGAELVRSGASVKLSCTASGFNIKDYYIHWVNQRPDQGLEWIGWIDPENGDTEFVPKFQGKATMTADIFSNTAYLHLSSLTSEDTAVYYCKTGGFWGQGTLVTVSSGGGGSGGGGSGGGGSQVVLTQSPAIMSASPGEKVTMACSASSSVRFIHWYQQKSGTSPKRWIYDTSKLASGVPTRFSGSGSGTSYSLTISTMEAEDAATYYCQQWSSSPFTFGSGTKLIIKSGGGGSEVQLVESGGGLVQPGGSLKLSCAASGFTFNKYAMNWVRQAPGKGLEWVARIRSKYNNYATYYADSVKDRFTISRDDSKNTAYLQMNNLKTEDTAVYYCVRHGNFGNSYISYWAYWGQGTLVTVSSGGGGSGGGGSGGGGSQTVVTQEPSLTVSPGGTVTLTCGSSTGAVTSGNYPNWVQQKPGQAPRGLIGGTKFLAPGTPARFSGSLLGGKAALTLSGVQPEDEAEYYCVLWYSNRWVFGGGTKLTVL

SEQ ID NO: 440 - DNA, 1464 bp, Artificial Sequence
  PSCA-4 HL x I2C HL
gaagtgcagctgcagcagtctggagccgagctggtcagatctggagccagcgtgaagctgtcttgcaccgccagcggcttcaacatcaaggactactacatccactgggtgaaccagaggcccgaccagggcctggaatggatcggctggatcgaccccgagaacggcgacaccgagttcgtgcccaagttccagggcaaggccaccatgaccgccgacatcttcagcaacaccgcctacctgcacctgagcagcctgacctctgaggacaccgccgtgtactactgcaagaccggcggcttctggggacagggcaccctggtcaccgtgtcctccggtggtggtggttctggcggcggcggctccggtggtggtggttctcaggtggtgctgacccagagcccagccatcatgagcgccagcccaggcgagaaagtgaccatggcctgcagcgccagcagcagcgtgcggttcatccactggtatcagcagaagtccggcaccagccccaagagatggatctacgacaccagcaagctggctagcggcgtgccaaccagattcagcggaagcggctccggcacctcctacagcctgaccatcagcaccatggaagccgaggacgccgccacctactactgccagcagtggagcagcagccccttcaccttcggcagcggcaccaagctgatcatcaagtccggaggtggtggatccgaggtgcagctggtcgagtctggaggaggattggtgcagcctggagggtcattgaaactctcatgtgcagcctctggattcaccttcaataagtacgccatgaactgggtccgccaggctccaggaaagggtttggaatgggttgctcgcataagaagtaaatataataattatgcaacatattatgccgattcagtgaaagacaggttcaccatctccagagatgattcaaaaaacactgcctatctacaaatgaacaacttgaaaactgaggacactgccgtgtactactgtgtgagacatgggaacttcggtaatagctacatatcctactgggcttactggggccaagggactctggtcaccgtctcctcaggtggtggtggttctggcggcggcggctccggtggtggtggttctcagactgttgtgactcaggaaccttcactcaccgtatcacctggtggaacagtcacactcacttgtggctcctcgactggggctgttacatctggcaactacccaaactgggtccaacaaaaaccaggtcaggcaccccgtggtctaataggtgggactaagttcctcgcccccggtactcctgccagattctcaggctccctgcttggaggcaaggctgccctcaccctctcaggggtacagccagaggatgaggcagaatattactgtgttctatggtacagcaaccgctgggtgttcggtggaggaaccaaactgactgtccta

SEQ ID NO: 441 - protein, 487 aa, Artificial Sequence
  PSCA-4 LH x I2C HL
QVVLTQSPAIMSASPGEKVTMACSASSSVRFIHWYQQKSGTSPKRWIYDTSKLASGVPTRFSGSGSGTSYSLTISTMEAEDAATYYCQQWSSSPFTFGSGTKLIIKGGGGSGGGGSGGGGSEVQLQQSGAELVRSGASVKLSCTASGFNIKDYYIHWVNQRPDQGLEWIGWIDPENGDTEFVPKFQGKATMTADIFSNTAYLHLSSLTSEDTAVYYCKTGGFWGQGTLVTVSSGGGGSEVQLVESGGGLVQPGGSLKLSCAASGFTFNKYAMNWVRQAPGKGLEWVARIRSKYNNYATYYADSVKDRFTISRDDSKNTAYLQMNNLKTEDTAVYYCVRHGNFGNSYISYWAYWGQGTLVTVSSGGGGSGGGGSGGGGSQTVVTQEPSLTVSPGGTVTLTCGSSTGAVTSGNYPNWVQQKPGQAPRGLIGGTKFLAPGTPARFSGSLLGGKAALTLSGVQPEDEAEYYCVLWYSNRWVFGGGTKLTVL

SEQ ID NO: 442 - DNA, 1461 bp, Artificial Sequence
  PSCA-4 LH x I2C HL
caggtggtgctgacccagagcccagccatcatgagcgccagcccaggcgagaaagtgaccatggcctgcagcgccagcagcagcgtgcggttcatccactggtatcagcagaagtccggcaccagccccaagagatggatctacgacaccagcaagctggctagcggcgtgccaaccagattcagcggaagcggctccggcacctcctacagcctgaccatcagcaccatggaagccgaggacgccgccacctactactgccagcagtggagcagcagccccttcaccttcggcagcggcaccaagctgatcatcaagggtggtggtggttctggcggcggcggctccggtggtggtggttctgaagtgcagctgcagcagtctggagccgagctggtcagatctggagccagcgtgaagctgtcttgcaccgccagcggcttcaacatcaaggactactacatccactgggtgaaccagaggcccgaccagggcctggaatggatcggctggatcgaccccgagaacggcgacaccgagttcgtgcccaagttccagggcaaggccaccatgaccgccgacatcttcagcaacaccgcctacctgcacctgagcagcctgacctctgaggacaccgccgtgtactactgcaagaccggcggcttctggggacagggcaccctggtcaccgtgtcctccggaggtggtggatccgaggtgcagctggtcgagtctggaggaggattggtgcagcctggagggtcattgaaactctcatgtgcagcctctggattcaccttcaataagtacgccatgaactgggtccgccaggctccaggaaagggtttggaatgggttgctcgcataagaagtaaatataataattatgcaacatattatgccgattcagtgaaagacaggttcaccatctccagagatgattcaaaaaacactgcctatctacaaatgaacaacttgaaaactgaggacactgccgtgtactactgtgtgagacatgggaacttcggtaatagctacatatcctactgggcttactggggccaagggactctggtcaccgtctcctcaggtggtggtggttctggcggcggcggctccggtggtggtggttctcagactgttgtgactcaggaaccttcactcaccgtatcacctggtggaacagtcacactcacttgtggctcctcgactggggctgttacatctggcaactacccaaactgggtccaacaaaaaccaggtcaggcaccccgtggtctaataggtgggactaagttcctcgcccccggtactcctgccagattctcaggctccctgcttggaggcaaggctgccctcaccctctcaggggtacagccagaggatgaggcagaatattactgtgttctatggtacagcaaccgctgggtgttcggtggaggaaccaaactgactgtccta

SEQ ID NO: 443 - protein, 130 aa, Homo sapiens
MGWSCIILFLVATATGVHSDYKDDDDKLLCYSCKAQVSNEDCLQVENCTQLGEQCWTARIRAVGLLTVISKGCSLNCVDDSQDYYVGKKNITCCDTDLCNASGAHALQPAAAILALLPALGLLLWGPGQL

SEQ ID NO: 444 - DNA, 393 bp, Homo sapiens
atgggatggagctgtatcatcctcttcttggtagcaacagctacaggtgtacactccgattacaaggacgacgatgacaagctgctgtgctactcctgcaaagcccaggtgagcaacgaggactgcctgcaggtggagaactgcacccagctgggggagcagtgctggaccgcgcgcatccgcgcagttggcctcctgaccgtcatcagcaaaggctgcagcttgaactgcgtggatgactcacaggactactacgtgggcaagaagaacatcacgtgctgtgacaccgacttgtgcaacgccagcggggcccatgccctgcagccggctgctgccatccttgcgctgctccctgcactcggcctgctgctctggggacccggccagctctag

SEQ ID NO: 445 - protein, 130 aa, Macaca fascicularis
MGWSCIILFLVATATGVHSDYKDDDDKLLCYSCKAQVSNEDCLNVENCTQPEEQCWTERIRAVGLLTVISKGCSSNCVDDSQDYYVGKKNITCCDTDLCNASGAHALQPAAAILALLPALSLLLWGPRQL

SEQ ID NO: 446 - DNA, 393 bp, Macaca fascicularis
atgggatggagctgtatcatcctcttcttggtagcaacagctacaggtgtacactccgattacaaggacgacgatgacaagctgctgtgctactcctgcaaggcccaggtgagcaacgaggactgcctgaatgtggagaactgcacgcagccggaggagcagtgctggaccgagcgcatccgcgccgtgggcctcctgaccgtcatcagcaaaggctgcagctcaaactgcgtggatgactcacaggactactacgtgggcaagaagaacatcacctgctgtgacaccgacctgtgcaacgccagcggggcccatgcactgcagccggctgctgccatcctggcactgctccctgcactcagcctgctgctttggggccccagacagctgtag

SEQ ID NO: 447 - DNA, 21 bp, Artificial Sequence
  forward primer
caccacagcccaccagtgacc

SEQ ID NO: 448 - DNA, 21 bp, Artificial Sequence
  reverse primer
gaggcctggggcaccacaccc

SEQ ID NO: 449 - DNA, 54 bp, Artificial Sequence
  P3-VH-A-XhoI
cctgatctcgagagcggcscagasstgraaaagccaggcgccacggtgaagatt

SEQ ID NO: 450 - DNA, 69 bp, Artificial Sequence
  P3-VH-B
ggcgccacggtgaagatttcctgcaagsycagcggcwacacgttcaccggctactacatccactgggtg

SEQ ID NO: 451 - DNA, 87 bp, Artificial Sequence
  P3-VH-C
gtaggaggtgaagccgttgttggggtccactctgccsatccattccaggcycttcccgkgggmctgttkcacccagtggatgtagta

SEQ ID NO: 452 - DNA, 87 bp, Artificial Sequence
  P3-VH-D
aacggcttcacctcctacaaccagaagttcaagggcarggycayamtkaccgyggacamgagcaccrrcaccgcctacatggaactg

SEQ ID NO: 453 - DNA, 78 bp, Artificial Sequence
  P3-VH-E
gctgtcgaagaagttgcccrcgcaatagtacacggcggtgtcctcgctgskcaggctkctcagttccatgtaggcggt

SEQ ID NO: 454 - DNA, 48 bp, Artificial Sequence
  P3-VH-F-BstEII
cacgtcggtgaccgtggttccctggccccagctgtcgaagaagttgcc

SEQ ID NO: 455 - DNA, 87 bp, Artificial Sequence
  PSCA2VH-A-XHO1
caggtgctcgagycaggcgccgaastgrwgaagcctggcgccmcagtgaagmtatcctgcaaggycagcggctacaccttcaccaac

SEQ ID NO: 456 - DNA, 93 bp, Artificial Sequence
  PSCA2VH-B
gctgtcgctggggtcgatcctgccyatccattccaggcccytgccgggcsyctgttkcacccagttcagccagtagttggtgaaggtgtagcc

SEQ ID NO: 457 - DNA, 93 bp, Artificial Sequence
  PSCA2VH-C
aggatcgaccccagcgacagcgagatccactacgaccagaagttcaaggacaragycaccmtaaccgyggacamgagcaccrrcaccgcctac

SEQ ID NO: 458 - DNA, 76 bp, Artificial Sequence
  PSCA2VH-D
ggccagggcgcaatagtacacggcggtgtcctcgcttstcaggctggacagctssatgtaggcggtgyyggtgctc

SEQ ID NO: 459 - DNA, 72 bp, Artificial Sequence
  PSCA2VH-E-BSTE2
agacacggtgaccgtggtgccctggccccagtaggccatggcgtagatgccggtcagggcgcaatagtacac

SEQ ID NO: 460 - DNA, 69 bp, Artificial Sequence
  P3-VL-A-SacI
cctgtagagctcgtcatgacccagtcccccctgtccctgmscgtgaccmtcggccagccagccagcatc

SEQ ID NO: 461 - DNA, 75 bp, Artificial Sequence
  P3-VL-B
ccagttcaggtaggtcttgccgtcgctgtccagcagggactggctggacttgcaagagatgctggctggctggcc

SEQ ID NO: 462 - DNA, 75 bp, Artificial Sequence
  P3-VL-C
aagacctacctgaactggytscwgcagaggccaggccagagccccargaggctgatctacctggtgtccaccctg

SEQ ID NO: 463 - DNA, 72 bp, Artificial Sequence
  P3-VL-D
ggtgaagtcggtgccggagccgctgccggagaatctgtctggcacgccgctgtccagggtggacaccaggta

SEQ ID NO: 464 - DNA, 78 bp, Artificial Sequence
  P3-VL-E
tccggcaccgacttcaccctgaagatcagcagggtggaggccgaggacstgggcgtgtactactgctggcagggcacc

SEQ ID NO: 465 - DNA, 81 bp, Artificial Sequence
  P3-VL-F-BsiWI/SpeI
ccagacactagtcgtacgcttgatttccagcttggtccctccgccgaaggtccttgggaagtgggtgccctgccagcagta

SEQ ID NO: 466 - DNA, 84 bp, Artificial Sequence
  PSCA2VL-a-SAC1
cagacagagctcgtgatgacccagkcasctcyaagcstgccagtgaccccaggcgagycagygtccatcagctgcaggtccagc

SEQ ID NO: 467 - DNA, 91 bp, Artificial Sequence
  PSCA2VL-b
ctgggggctctggcctggcytctgcagawaccagtacaggtaggtgttgccgttgctgtgcagcaggctcttgctggacctgcagctgatg

SEQ ID NO: 468 - DNA, 90 bp, Artificial Sequence
  PSCA2VL-c
ccaggccagagcccccagctgctgatctacaggatgagcaacctggctagcggcgtgccagacagattcagcggcagcggctctggaacc

SEQ ID NO: 469 - DNA, 78 bp, Artificial Sequence
  PSCA2VL-d
caggcagtagtacacgcccacgtcctcggcctccaccctgctgatcytcagggtgaagkcggttccagagccgctgcc

SEQ ID NO: 470 - DNA, 90 bp, Artificial Sequence
  PSCA2VL-e-BsiW1-Spe1
gtgctgactagtcgtacgcttgatttccagcttggtcccttggccgaaggtgtaggggtattccaggtgctgcaggcagtagtacacgcc

SEQ ID NO: 471 - protein, 111 aa, Artificial Sequence
  HD37 L
DIQLTQSPASLAVSLGQRATISCKASQSVDYDGDSYLNWYQQIPGQPPKLLIYDASNLVSGIPPRFSGSGSGTDFTLNIHPVEKVDAATYHCQQSTEDPWTFGGGTKLEIK

SEQ ID NO: 472 - DNA, 333 bp, Artificial Sequence
  HD37 L
gatatccagctgacccagtctccagcttctttggctgtgtctctagggcagagggccaccatctcctgcaaggccagccaaagtgttgattatgatggtgatagttatttgaactggtaccaacagattccaggacagccacccaaactcctcatctatgatgcatccaatctagtttctgggatcccacccaggtttagtggcagtgggtctgggacagacttcaccctcaacatccatcctgtggagaaggtggatgctgcaacctatcactgtcagcaaagtactgaggatccgtggacgttcggtggagggaccaagctcgagatcaaa

SEQ ID NO: 473 - protein, 15 aa, Artificial Sequence
  HD37 LCDR1
KASQSVDYDGDSYLN

SEQ ID NO: 474 - protein, 7 aa, Artificial Sequence
  HD37 LCDR2
DASNLVS

SEQ ID NO: 475 - protein, 9 aa, Artificial Sequence
  HD37 LCDR3
QQSTEDPWT

SEQ ID NO: 476 - protein, 124 aa, Artificial Sequence
  HD37 H
QVQLQQSGAELVRPGSSVKISCKASGYAFSSYWMNWVKQRPGQGLEWIGQIWPGDGDTNYNGKFKGKATLTADESSSTAYMQLSSLASEDSAVYFCARRETTTVGRYYYAMDYWGQGTTVTVSS

SEQ ID NO: 477 - DNA, 372 bp, Artificial Sequence
  HD37 H
caggtgcagctgcagcagtctggggctgagctggtgaggcctgggtcctcagtgaagatttcctgcaaggcttctggctatgcattcagtagctactggatgaactgggtgaagcagaggcctggacagggtcttgagtggattggacagatttggcctggagatggtgatactaactacaatggaaagttcaagggtaaagccactctgactgcagacgaatcctccagcacagcctacatgcaactcagcagcctagcatctgaggactctgcggtctatttctgtgcaagacgggagactacgacggtaggccgttattactatgctatggactactggggccaagggaccacggtcaccgtctcctcc

SEQ ID NO: 478 - protein, 5 aa, Artificial Sequence
  HD37 HCDR1
SYWMN

SEQ ID NO: 479 - protein, 17 aa, Artificial Sequence
  HD37 HCDR2
QIWPGDGDTNYNGKFKG

SEQ ID NO: 480 - protein, 15 aa, Artificial Sequence
  HD37 HCDR3
RETTTVGRYYYAMDY

SEQ ID NO: 481 - protein, 504 aa, Artificial Sequence
  HD37 LH x I2C HL
DIQLTQSPASLAVSLGQRATISCKASQSVDYDGDSYLNWYQQIPGQPPKLLIYDASNLVSGIPPRFSGSGSGTDFTLNIHPVEKVDAATYHCQQSTEDPWTFGGGTKLEIKGGGGSGGGGSGGGGSQVQLQQSGAELVRPGSSVKISCKASGYAFSSYWMNWVKQRPGQGLEWIGQIWPGDGDTNYNGKFKGKATLTADESSSTAYMQLSSLASEDSAVYFCARRETTTVGRYYYAMDYWGQGTTVTVSSGGGGSEVQLVESGGGLVQPGGSLKLSCAASGFTFNKYAMNWVRQAPGKGLEWVARIRSKYNNYATYYADSVKDRFTISRDDSKNTAYLQMNNLKTEDTAVYYCVRHGNFGNSYISYWAYWGQGTLVTVSSGGGGSGGGGSGGGGSQTVVTQEPSLTVSPGGTVTLTCGSSTGAVTSGNYPNWVQQKPGQAPRGLIGGTKFLAPGTPARFSGSLLGGKAALTLSGVQPEDEAEYYCVLWYSNRWVFGGGTKLTVL

SEQ ID NO: 482 - DNA, 1512 bp, Artificial Sequence
  HD37 LH x I2C HL
gatatccagctgacccagtctccagcttctttggctgtgtctctagggcagagggccaccatctcctgcaaggccagccaaagtgttgattatgatggtgatagttatttgaactggtaccaacagattccaggacagccacccaaactcctcatctatgatgcatccaatctagtttctgggatcccacccaggtttagtggcagtgggtctgggacagacttcaccctcaacatccatcctgtggagaaggtggatgctgcaacctatcactgtcagcaaagtactgaggatccgtggacgttcggtggagggaccaagctcgagatcaaaggtggtggtggttctggcggcggcggctccggtggtggtggttctcaggtgcagctgcagcagtctggggctgagctggtgaggcctgggtcctcagtgaagatttcctgcaaggcttctggctatgcattcagtagctactggatgaactgggtgaagcagaggcctggacagggtcttgagtggattggacagatttggcctggagatggtgatactaactacaatggaaagttcaagggtaaagccactctgactgcagacgaatcctccagcacagcctacatgcaactcagcagcctagcatctgaggactctgcggtctatttctgtgcaagacgggagactacgacggtaggccgttattactatgctatggactactggggccaagggaccacggtcaccgtctcctccggaggtggtggatccgaggtgcagctggtcgagtctggaggaggattggtgcagcctggagggtcattgaaactctcatgtgcagcctctggattcaccttcaataagtacgccatgaactgggtccgccaggctccaggaaagggtttggaatgggttgctcgcataagaagtaaatataataattatgcaacatattatgccgattcagtgaaagacaggttcaccatctccagagatgattcaaaaaacactgcctatctacaaatgaacaacttgaaaactgaggacactgccgtgtactactgtgtgagacatgggaacttcggtaatagctacatatcctactgggcttactggggccaagggactctggtcaccgtctcctcaggtggtggtggttctggcggcggcggctccggtggtggtggttctcagactgttgtgactcaggaaccttcactcaccgtatcacctggtggaacagtcacactcacttgtggctcctcgactggggctgttacatctggcaactacccaaactgggtccaacaaaaaccaggtcaggcaccccgtggtctaataggtgggactaagttcctcgcccccggtactcctgccagattctcaggctccctgcttggaggcaaggctgccctcaccctctcaggggtacagccagaggatgaggcagaatattactgtgttctatggtacagcaaccgctgggtgttcggtggaggaaccaaactgactgtccta

SEQ ID NO: 483 - protein, 504 aa, Artificial Sequence
  HD37  LH x H2C HL
DIQLTQSPASLAVSLGQRATISCKASQSVDYDGDSYLNWYQQIPGQPPKLLIYDASNLVSGIPPRFSGSGSGTDFTLNIHPVEKVDAATYHCQQSTEDPWTFGGGTKLEIKGGGGSGGGGSGGGGSQVQLQQSGAELVRPGSSVKISCKASGYAFSSYWMNWVKQRPGQGLEWIGQIWPGDGDTNYNGKFKGKATLTADESSSTAYMQLSSLASEDSAVYFCARRETTTVGRYYYAMDYWGQGTTVTVSSGGGGSEVQLVESGGGLVQPGGSLKLSCAASGFTFNKYAMNWVRQAPGKGLEWVARIRSKYNNYATYYADSVKDRFTISRDDSKNTAYLQMNNLKTEDTAVYYCVRHGNFGNSYISYWAYWGQGTLVTVSSGGGGSGGGGSGGGGSQTVVTQEPSLTVSPGGTVTLTCGSSTGAVTSGYYPNWVQQKPGQAPRGLIGGTKFLAPGTPARFSGSLLGGKAALTLSGVQPEDEAEYYCALWYSNRWVFGGGTKLTVL

SEQ ID NO: 484 - DNA, 1512 bp, Artificial Sequence
  HD37  LH x H2C HL
gatatccagctgacccagtctccagcttctttggctgtgtctctagggcagagggccaccatctcctgcaaggccagccaaagtgttgattatgatggtgatagttatttgaactggtaccaacagattccaggacagccacccaaactcctcatctatgatgcatccaatctagtttctgggatcccacccaggtttagtggcagtgggtctgggacagacttcaccctcaacatccatcctgtggagaaggtggatgctgcaacctatcactgtcagcaaagtactgaggatccgtggacgttcggtggagggaccaagctcgagatcaaaggtggtggtggttctggcggcggcggctccggtggtggtggttctcaggtgcagctgcagcagtctggggctgagctggtgaggcctgggtcctcagtgaagatttcctgcaaggcttctggctatgcattcagtagctactggatgaactgggtgaagcagaggcctggacagggtcttgagtggattggacagatttggcctggagatggtgatactaactacaatggaaagttcaagggtaaagccactctgactgcagacgaatcctccagcacagcctacatgcaactcagcagcctagcatctgaggactctgcggtctatttctgtgcaagacgggagactacgacggtaggccgttattactatgctatggactactggggccaagggaccacggtcaccgtctcctccggaggtggtggatccgaggtgcagctggtcgagtctggaggaggattggtgcagcctggagggtcattgaaactctcatgtgcagcctctggattcaccttcaataagtacgccatgaactgggtccgccaggctccaggaaagggtttggaatgggttgctcgcataagaagtaaatataataattatgcaacatattatgccgattcagtgaaagacaggttcaccatctccagagatgattcaaaaaacactgcctatctacaaatgaacaacttgaaaactgaggacactgccgtgtactactgtgtgagacatgggaacttcggtaatagctacatatcctactgggcttactggggccaagggactctggtcaccgtctcctcaggtggtggtggttctggcggcggcggctccggtggtggtggttctcagactgttgtgactcaggaaccttcactcaccgtatcacctggtggaacagtcacactcacttgtggctcctcgactggggctgttacatctggctactacccaaactgggtccaacaaaaaccaggtcaggcaccccgtggtctaataggtgggactaagttcctcgcccccggtactcctgccagattctcaggctccctgcttggaggcaaggctgccctcaccctctcaggggtacagccagaggatgaggcagaatattactgtgctctatggtacagcaaccgctgggtgttcggtggaggaaccaaactgactgtccta

SEQ ID NO: 485 - protein, 504 aa, Artificial Sequence
  HD37  LH x F12Q HL
DIQLTQSPASLAVSLGQRATISCKASQSVDYDGDSYLNWYQQIPGQPPKLLIYDASNLVSGIPPRFSGSGSGTDFTLNIHPVEKVDAATYHCQQSTEDPWTFGGGTKLEIKGGGGSGGGGSGGGGSQVQLQQSGAELVRPGSSVKISCKASGYAFSSYWMNWVKQRPGQGLEWIGQIWPGDGDTNYNGKFKGKATLTADESSSTAYMQLSSLASEDSAVYFCARRETTTVGRYYYAMDYWGQGTTVTVSSGGGGSEVQLVESGGGLVQPGGSLKLSCAASGFTFNSYAMNWVRQAPGKGLEWVARIRSKYNNYATYYADSVKGRFTISRDDSKNTAYLQMNNLKTEDTAVYYCVRHGNFGNSYVSWWAYWGQGTLVTVSSGGGGSGGGGSGGGGSQTVVTQEPSLTVSPGGTVTLTCGSSTGAVTSGNYPNWVQQKPGQAPRGLIGGTKFLAPGTPARFSGSLLGGKAALTLSGVQPEDEAEYYCVLWYSNRWVFGGGTKLTVL

SEQ ID NO: 486 - DNA, 1512 bp, Artificial Sequence
  HD37  LH x F12Q HL
gatatccagctgacccagtctccagcttctttggctgtgtctctagggcagagggccaccatctcctgcaaggccagccaaagtgttgattatgatggtgatagttatttgaactggtaccaacagattccaggacagccacccaaactcctcatctatgatgcatccaatctagtttctgggatcccacccaggtttagtggcagtgggtctgggacagacttcaccctcaacatccatcctgtggagaaggtggatgctgcaacctatcactgtcagcaaagtactgaggatccgtggacgttcggtggagggaccaagctcgagatcaaaggtggtggtggttctggcggcggcggctccggtggtggtggttctcaggtgcagctgcagcagtctggggctgagctggtgaggcctgggtcctcagtgaagatttcctgcaaggcttctggctatgcattcagtagctactggatgaactgggtgaagcagaggcctggacagggtcttgagtggattggacagatttggcctggagatggtgatactaactacaatggaaagttcaagggtaaagccactctgactgcagacgaatcctccagcacagcctacatgcaactcagcagcctagcatctgaggactctgcggtctatttctgtgcaagacgggagactacgacggtaggccgttattactatgctatggactactggggccaagggaccacggtcaccgtctcctccggaggtggtggatccgaggtgcagctggtcgagtctggaggaggattggtgcagcctggagggtcattgaaactctcatgtgcagcctctggattcaccttcaatagctacgccatgaactgggtccgccaggctccaggaaagggtttggaatgggttgctcgcataagaagtaaatataataattatgcaacatattatgccgattcagtgaaaggcaggttcaccatctccagagatgattcaaaaaacactgcctatctacaaatgaacaacttgaaaactgaggacactgccgtgtactactgtgtgagacatgggaacttcggtaatagctacgtttcctggtgggcttactggggccaagggactctggtcaccgtctcctcaggtggtggtggttctggcggcggcggctccggtggtggtggttctcagactgttgtgactcaggaaccttcactcaccgtatcacctggtggaacagtcacactcacttgtggctcctcgactggggctgttacatctggcaactacccaaactgggtccaacaaaaaccaggtcaggcaccccgtggtctaataggtgggactaagttcctcgcccccggtactcctgccagattctcaggctccctgcttggaggcaaggctgccctcaccctctcaggggtacagccagaggatgaggcagaatattactgtgttctatggtacagcaaccgctgggtgttcggtggaggaaccaaactgactgtccta

SEQ ID NO: 487 - protein, 111 aa, Artificial Sequence
  hCD19 26-D6 L
DIQMTQSPASLSASLGDRVTITCKASQSVDYDGDSYLNWYQQKPGKAPKLLIYDASNLVSGIPSRFSGSGSGTDFTLTISSLQQVDFATYYCQQSTEDPWTFGQGTKVEIK

SEQ ID NO: 488 - DNA, 333 bp, Artificial Sequence
  hCD19 26-D6 L
gacatccagatgacccagtctccagcttctttgtctgcgtctctaggggacagagtcaccatcacctgcaaggccagccaaagtgttgattatgatggtgatagttatttgaactggtaccaacagaaaccaggaaaggcacccaaactcctcatctatgatgcatccaatctagtttctgggatcccatccaggtttagtggcagtgggtctgggacagacttcaccctcaccatcagttctctgcagcaggtggatttcgcaacctattactgtcagcaaagtactgaggatccgtggacgttcggtcaagggaccaaggtggagatcaaa

SEQ ID NO: 489 - protein, 15 aa, Artificial Sequence
  hCD19 26-D6 LCDR1
KASQSVDYDGDSYLN

SEQ ID NO: 490 - protein, 7 aa, Artificial Sequence
  hCD19 26-D6 LCDR2
DASNLVS

SEQ ID NO: 491 - protein, 9 aa, Artificial Sequence
  hCD19 26-D6 LCDR3
QQSTEDPWT

SEQ ID NO: 492 - protein, 124 aa, Artificial Sequence
  hCD19 26-D6 H
QVQLVQSGAEVKKPGASVKVSCKASGYTFTSYWMNWVKQGPGQGLEWMGQIWPGDGDTNYNGKFKGRVTMTADASTSTVYMELSSLRSEDTAVYFCARRETTTVGRYYYAMDYWGQGTTVTVSS

SEQ ID NO: 493 - DNA, 372 bp, Artificial Sequence
  hCD19 26-D6 H
caggtgcagctggtccagtctggggctgaggtgaagaagcctggggcctcagtgaaggtttcctgcaaggcttctggctatacattcactagctactggatgaactgggtgaagcagggccctggacagggtcttgagtggatgggacagatttggcctggagatggtgatactaactacaatggaaagttcaagggtagagtcactatgactgctgacgcatccaccagcacagtctacatggaactcagcagcctgcgatctgaggacactgcggtctatttctgtgcaagacgggagactacgacggtaggccgttattactatgctatggactactggggccaagggaccacggtcaccgtctcctcc

SEQ ID NO: 494 - protein, 5 aa, Artificial Sequence
  hCD19 26-D6 HCDR1
SYWMN

SEQ ID NO: 495 - protein, 17 aa, Artificial Sequence
  hCD19 26-D6 HCDR2
QIWPGDGDTNYNGKFKG

SEQ ID NO: 496 - protein, 15 aa, Artificial Sequence
  hCD19 26-D6 HCDR3
RETTTVGRYYYAMDY

SEQ ID NO: 497 - protein, 504 aa, Artificial Sequence
  hCD19 26-D6 LH x I2C HL
DIQMTQSPASLSASLGDRVTITCKASQSVDYDGDSYLNWYQQKPGKAPKLLIYDASNLVSGIPSRFSGSGSGTDFTLTISSLQQVDFATYYCQQSTEDPWTFGQGTKVEIKGGGGSGGGGSGGGGSQVQLVQSGAEVKKPGASVKVSCKASGYTFTSYWMNWVKQGPGQGLEWMGQIWPGDGDTNYNGKFKGRVTMTADASTSTVYMELSSLRSEDTAVYFCARRETTTVGRYYYAMDYWGQGTTVTVSSGGGGSEVQLVESGGGLVQPGGSLKLSCAASGFTFNKYAMNWVRQAPGKGLEWVARIRSKYNNYATYYADSVKDRFTISRDDSKNTAYLQMNNLKTEDTAVYYCVRHGNFGNSYISYWAYWGQGTLVTVSSGGGGSGGGGSGGGGSQTVVTQEPSLTVSPGGTVTLTCGSSTGAVTSGNYPNWVQQKPGQAPRGLIGGTKFLAPGTPARFSGSLLGGKAALTLSGVQPEDEAEYYCVLWYSNRWVFGGGTKLTVL

SEQ ID NO: 498 - DNA, 1512 bp, Artificial Sequence
  hCD19 26-D6 LH x I2C HL
gacatccagatgacccagtctccagcttctttgtctgcgtctctaggggacagagtcaccatcacctgcaaggccagccaaagtgttgattatgatggtgatagttatttgaactggtaccaacagaaaccaggaaaggcacccaaactcctcatctatgatgcatccaatctagtttctgggatcccatccaggtttagtggcagtgggtctgggacagacttcaccctcaccatcagttctctgcagcaggtggatttcgcaacctattactgtcagcaaagtactgaggatccgtggacgttcggtcaagggaccaaggtggagatcaaaggtggtggtggttctggcggcggcggctccggtggtggtggttctcaggtgcagctggtccagtctggggctgaggtgaagaagcctggggcctcagtgaaggtttcctgcaaggcttctggctatacattcactagctactggatgaactgggtgaagcagggccctggacagggtcttgagtggatgggacagatttggcctggagatggtgatactaactacaatggaaagttcaagggtagagtcactatgactgctgacgcatccaccagcacagtctacatggaactcagcagcctgcgatctgaggacactgcggtctatttctgtgcaagacgggagactacgacggtaggccgttattactatgctatggactactggggccaagggaccacggtcaccgtctcctccggaggtggtggatccgaggtgcagctggtcgagtctggaggaggattggtgcagcctggagggtcattgaaactctcatgtgcagcctctggattcaccttcaataagtacgccatgaactgggtccgccaggctccaggaaagggtttggaatgggttgctcgcataagaagtaaatataataattatgcaacatattatgccgattcagtgaaagacaggttcaccatctccagagatgattcaaaaaacactgcctatctacaaatgaacaacttgaaaactgaggacactgccgtgtactactgtgtgagacatgggaacttcggtaatagctacatatcctactgggcttactggggccaagggactctggtcaccgtctcctcaggtggtggtggttctggcggcggcggctccggtggtggtggttctcagactgttgtgactcaggaaccttcactcaccgtatcacctggtggaacagtcacactcacttgtggctcctcgactggggctgttacatctggcaactacccaaactgggtccaacaaaaaccaggtcaggcaccccgtggtctaataggtgggactaagttcctcgcccccggtactcctgccagattctcaggctccctgcttggaggcaaggctgccctcaccctctcaggggtacagccagaggatgaggcagaatattactgtgttctatggtacagcaaccgctgggtgttcggtggaggaaccaaactgactgtccta

SEQ ID NO: 499 - protein, 111 aa, Artificial Sequence
  hCD19 45-A10 L
DIQMTQSPASLSVSVGERVTITCKASQSVDYDGDSYLNWYQQKPGKAPKLLIYDASNLVSGVPPRFSGSGSGTDFTLTISSVQPEDFATYYCQQSTEDPWTFGQGTKVEIK

SEQ ID NO: 500 - DNA, 333 bp, Artificial Sequence
  hCD19 45-A10 L
gacatccagatgacccagtctccagcttctttgtctgtgtctgtaggggagagagtcaccatcacctgcaaggccagccaaagtgttgattatgatggtgatagttatttgaactggtaccaacagaaaccaggaaaggcacccaaactcctcatctatgatgcatccaatctagtttctggggtcccacccaggtttagtggcagtgggtctgggacagacttcaccctcaccatcagttctgtgcagccggaggatttcgcaacctattactgtcagcaaagtactgaggatccgtggacgttcggtcaagggaccaaggtggagatcaaa

SEQ ID NO: 501 - protein, 15 aa, Artificial Sequence
  hCD19 45-A10 LCDR1
KASQSVDYDGDSYLN

SEQ ID NO: 502 - protein, 7 aa, Artificial Sequence
  hCD19 45-A10 LCDR2
DASNLVS

SEQ ID NO: 503 - protein, 9 aa, Artificial Sequence
  hCD19 45-A10 LCDR3
QQSTEDPWT

SEQ ID NO: 504 - protein, 124 aa, Artificial Sequence
  hCD19 45-A10 H
QVQLVQSGAELKKPGSSVKISCKASGYSFTSYWMNWVKQAPGQGLEWMGQIWPGDGDTNYNGKFKGKATMTADPSTSTAYMELSSLGSEDTAVYYCARRETTTVGRYYYAMDYWGQGTTVTVSS

SEQ ID NO: 505 - DNA, 372 bp, Artificial Sequence
  hCD19 45-A10 H
caggtgcagctggtccagtctggggctgagctgaagaagcctgggtcctcagtgaagatttcctgcaaggcttctggctattcattcactagctactggatgaactgggtgaagcaggcccctggacagggtcttgagtggatgggacagatttggcctggagatggtgatactaactacaatggaaagttcaagggtaaagccactatgactgctgacccatccaccagcacagcctacatggaactcagcagcctgggatctgaggacactgcggtctattactgtgcaagacgggagactacgacggtaggccgttattactatgctatggactactggggccaagggaccacggtcaccgtctcctcc

SEQ ID NO: 506 - protein, 5 aa, Artificial Sequence
  hCD19 45-A10 HCDR1
SYWMN

SEQ ID NO: 507 - protein, 17 aa, Artificial Sequence
  hCD19 45-A10 HCDR2
QIWPGDGDTNYNGKFKG

SEQ ID NO: 508 - protein, 15 aa, Artificial Sequence
  hCD19 45-A10 HCDR3
RETTTVGRYYYAMDY

SEQ ID NO: 509 - protein, 504 aa, Artificial Sequence
  hCD19 45-A10 LH x I2C HL
DIQMTQSPASLSVSVGERVTITCKASQSVDYDGDSYLNWYQQKPGKAPKLLIYDASNLVSGVPPRFSGSGSGTDFTLTISSVQPEDFATYYCQQSTEDPWTFGQGTKVEIKGGGGSGGGGSGGGGSQVQLVQSGAELKKPGSSVKISCKASGYSFTSYWMNWVKQAPGQGLEWMGQIWPGDGDTNYNGKFKGKATMTADPSTSTAYMELSSLGSEDTAVYYCARRETTTVGRYYYAMDYWGQGTTVTVSSGGGGSEVQLVESGGGLVQPGGSLKLSCAASGFTFNKYAMNWVRQAPGKGLEWVARIRSKYNNYATYYADSVKDRFTISRDDSKNTAYLQMNNLKTEDTAVYYCVRHGNFGNSYISYWAYWGQGTLVTVSSGGGGSGGGGSGGGGSQTVVTQEPSLTVSPGGTVTLTCGSSTGAVTSGNYPNWVQQKPGQAPRGLIGGTKFLAPGTPARFSGSLLGGKAALTLSGVQPEDEAEYYCVLWYSNRWVFGGGTKLTVL

SEQ ID NO: 510 - DNA, 1512 bp, Artificial Sequence
  hCD19 45-A10 LH x I2C HL
gacatccagatgacccagtctccagcttctttgtctgtgtctgtaggggagagagtcaccatcacctgcaaggccagccaaagtgttgattatgatggtgatagttatttgaactggtaccaacagaaaccaggaaaggcacccaaactcctcatctatgatgcatccaatctagtttctggggtcccacccaggtttagtggcagtgggtctgggacagacttcaccctcaccatcagttctgtgcagccggaggatttcgcaacctattactgtcagcaaagtactgaggatccgtggacgttcggtcaagggaccaaggtggagatcaaaggtggtggtggttctggcggcggcggctccggtggtggtggttctcaggtgcagctggtccagtctggggctgagctgaagaagcctgggtcctcagtgaagatttcctgcaaggcttctggctattcattcactagctactggatgaactgggtgaagcaggcccctggacagggtcttgagtggatgggacagatttggcctggagatggtgatactaactacaatggaaagttcaagggtaaagccactatgactgctgacccatccaccagcacagcctacatggaactcagcagcctgggatctgaggacactgcggtctattactgtgcaagacgggagactacgacggtaggccgttattactatgctatggactactggggccaagggaccacggtcaccgtctcctccggaggtggtggatccgaggtgcagctggtcgagtctggaggaggattggtgcagcctggagggtcattgaaactctcatgtgcagcctctggattcaccttcaataagtacgccatgaactgggtccgccaggctccaggaaagggtttggaatgggttgctcgcataagaagtaaatataataattatgcaacatattatgccgattcagtgaaagacaggttcaccatctccagagatgattcaaaaaacactgcctatctacaaatgaacaacttgaaaactgaggacactgccgtgtactactgtgtgagacatgggaacttcggtaatagctacatatcctactgggcttactggggccaagggactctggtcaccgtctcctcaggtggtggtggttctggcggcggcggctccggtggtggtggttctcagactgttgtgactcaggaaccttcactcaccgtatcacctggtggaacagtcacactcacttgtggctcctcgactggggctgttacatctggcaactacccaaactgggtccaacaaaaaccaggtcaggcaccccgtggtctaataggtgggactaagttcctcgcccccggtactcctgccagattctcaggctccctgcttggaggcaaggctgccctcaccctctcaggggtacagccagaggatgaggcagaatattactgtgttctatggtacagcaaccgctgggtgttcggtggaggaaccaaactgactgtccta

SEQ ID NO: 511 - protein, 111 aa, Artificial Sequence
  hCD19 46-B11 L
DIQMTQSPASLSASVGERVTITCKASQSVDYDGDSYLNWYQQIPGKPPKLLIYDASNLVSGIPSRFSGSGSGTDFTLTIHSLEQEDFATYYCQQSTEDPWTFGQGTKVEIK

SEQ ID NO: 512 - DNA, 333 bp, Artificial Sequence
  hCD19 46-B11 L
gacatccagatgacccagtctccagcttctttgtctgcgtctgtaggggaaagagtcaccatcacctgcaaggccagccaaagtgttgattatgatggtgatagttatttgaactggtaccaacagataccaggaaagccacccaaactcctcatctatgatgcatccaatctagtttctgggatcccatccaggtttagtggcagtgggtctgggacagacttcaccctcaccatccattctctggagcaggaggatttcgcaacctattactgtcagcaaagtactgaggatccgtggacgttcggtcaagggaccaaggtggagatcaaa

SEQ ID NO: 513 - protein, 15 aa, Artificial Sequence
  hCD19 46-B11 LCDR1
KASQSVDYDGDSYLN

SEQ ID NO: 514 - protein, 7 aa, Artificial Sequence
  hCD19 46-B11 LCDR2
DASNLVS

SEQ ID NO: 515 - protein, 9 aa, Artificial Sequence
  hCD19 46-B11 LCDR3
QQSTEDPWT

SEQ ID NO: 516 - protein, 124 aa, Artificial Sequence
  hCD19 46-B11 H
QVQLVQSGAEVVRPGASVKVSCKASGYSFTSYWMNWVRQPPGQGLEWIGQIWPGDGDTNYNGKFKGRATMTADASTSTVYMELSSLRSEDTAVYYCARRETTTVGRYYYAMDYWGQGTTVTVSS

SEQ ID NO: 517 - DNA, 372 bp, Artificial Sequence
  hCD19 46-B11 H
caggtgcagctggtccagtctggggctgaggtggtgaggcctggggcctcagtgaaggtttcctgcaaggcttctggctattcattcactagctactggatgaactgggtgaggcagccccctggacagggtcttgagtggattggacagatttggcctggagatggtgatactaactacaatggaaagttcaagggtagagccactatgactgctgacgcatccaccagcacagtctacatggaactcagcagcctgcgatctgaggacactgcggtctattactgtgcaagacgggagactacgacggtaggccgttattactatgctatggactactggggccaagggaccacggtcaccgtctcctcc

SEQ ID NO: 518 - protein, 5 aa, Artificial Sequence
  hCD19 46-B11 HCDR1
SYWMN

SEQ ID NO: 519 - protein, 17 aa, Artificial Sequence
  hCD19 46-B11 HCDR2
QIWPGDGDTNYNGKFKG

SEQ ID NO: 520 - protein, 15 aa, Artificial Sequence
  hCD19 46-B11 HCDR3
RETTTVGRYYYAMDY

SEQ ID NO: 521 - protein, 504 aa, Artificial Sequence
  hCD19 46-B11LH x I2C HL
DIQMTQSPASLSASVGERVTITCKASQSVDYDGDSYLNWYQQIPGKPPKLLIYDASNLVSGIPSRFSGSGSGTDFTLTIHSLEQEDFATYYCQQSTEDPWTFGQGTKVEIKGGGGSGGGGSGGGGSQVQLVQSGAEVVRPGASVKVSCKASGYSFTSYWMNWVRQPPGQGLEWIGQIWPGDGDTNYNGKFKGRATMTADASTSTVYMELSSLRSEDTAVYYCARRETTTVGRYYYAMDYWGQGTTVTVSSGGGGSEVQLVESGGGLVQPGGSLKLSCAASGFTFNKYAMNWVRQAPGKGLEWVARIRSKYNNYATYYADSVKDRFTISRDDSKNTAYLQMNNLKTEDTAVYYCVRHGNFGNSYISYWAYWGQGTLVTVSSGGGGSGGGGSGGGGSQTVVTQEPSLTVSPGGTVTLTCGSSTGAVTSGNYPNWVQQKPGQAPRGLIGGTKFLAPGTPARFSGSLLGGKAALTLSGVQPEDEAEYYCVLWYSNRWVFGGGTKLTVL

SEQ ID NO: 522 - DNA, 1512 bp, Artificial Sequence
  hCD19 46-B11LH x I2C HL
gacatccagatgacccagtctccagcttctttgtctgcgtctgtaggggaaagagtcaccatcacctgcaaggccagccaaagtgttgattatgatggtgatagttatttgaactggtaccaacagataccaggaaagccacccaaactcctcatctatgatgcatccaatctagtttctgggatcccatccaggtttagtggcagtgggtctgggacagacttcaccctcaccatccattctctggagcaggaggatttcgcaacctattactgtcagcaaagtactgaggatccgtggacgttcggtcaagggaccaaggtggagatcaaaggtggtggtggttctggcggcggcggctccggtggtggtggttctcaggtgcagctggtccagtctggggctgaggtggtgaggcctggggcctcagtgaaggtttcctgcaaggcttctggctattcattcactagctactggatgaactgggtgaggcagccccctggacagggtcttgagtggattggacagatttggcctggagatggtgatactaactacaatggaaagttcaagggtagagccactatgactgctgacgcatccaccagcacagtctacatggaactcagcagcctgcgatctgaggacactgcggtctattactgtgcaagacgggagactacgacggtaggccgttattactatgctatggactactggggccaagggaccacggtcaccgtctcctccggaggtggtggatccgaggtgcagctggtcgagtctggaggaggattggtgcagcctggagggtcattgaaactctcatgtgcagcctctggattcaccttcaataagtacgccatgaactgggtccgccaggctccaggaaagggtttggaatgggttgctcgcataagaagtaaatataataattatgcaacatattatgccgattcagtgaaagacaggttcaccatctccagagatgattcaaaaaacactgcctatctacaaatgaacaacttgaaaactgaggacactgccgtgtactactgtgtgagacatgggaacttcggtaatagctacatatcctactgggcttactggggccaagggactctggtcaccgtctcctcaggtggtggtggttctggcggcggcggctccggtggtggtggttctcagactgttgtgactcaggaaccttcactcaccgtatcacctggtggaacagtcacactcacttgtggctcctcgactggggctgttacatctggcaactacccaaactgggtccaacaaaaaccaggtcaggcaccccgtggtctaataggtgggactaagttcctcgcccccggtactcctgccagattctcaggctccctgcttggaggcaaggctgccctcaccctctcaggggtacagccagaggatgaggcagaatattactgtgttctatggtacagcaaccgctgggtgttcggtggaggaaccaaactgactgtccta

SEQ ID NO: 523 - protein, 111 aa, Artificial Sequence
  hCD19 47-A3 L
DIQMTQSPASLSASVGERVTITCKASQSVDYDGDSYLNWYQQIPGKAPKLLIYDASNLVSGVPSRFSGSGSGTDFTLTISSLQTEDFATYYCQQSTEDPWTFGQGTKVEIK

SEQ ID NO: 524 - DNA, 333 bp, Artificial Sequence
  hCD19 47-A3 L
gacatccagatgacccagtctccagcttctttgtctgcgtctgtaggggagagagtcaccatcacctgcaaggccagccaaagtgttgattatgatggtgatagttatttgaactggtaccaacagataccaggaaaggcacccaaactcctcatctatgatgcatccaatctagtttctggggtcccatccaggtttagtggcagtgggtctgggacagacttcaccctcaccatcagttctctgcagacggaggatttcgcaacctattactgtcagcaaagtactgaggatccgtggacgttcggtcaagggaccaaggtggagatcaaa

SEQ ID NO: 525 - protein, 15 aa, Artificial Sequence
  hCD19 47-A3 LCDR1
KASQSVDYDGDSYLN

SEQ ID NO: 526 - protein, 7 aa, Artificial Sequence
  hCD19 47-A3 LCDR2
DASNLVS

SEQ ID NO: 527 - protein, 9 aa, Artificial Sequence
  hCD19 47-A3 LCDR3
QQSTEDPWT

SEQ ID NO: 528 - protein, 124 aa, Artificial Sequence
  hCD19 47-A3 H
QVQLVQSGAEVKKPGASVKISCKASGYAFTSYWMNWVRQRPGQGLEWIGQIWPGDGDTNYNGKFKGRVTMTADASTSTVYMELSSLGSEDTAVYFCARRETTTVGRYYYAMDYWGQGTTVTVSS

SEQ ID NO: 529 - DNA, 372 bp, Artificial Sequence
  hCD19 47-A3 H
caggtgcagctggtccagtctggggctgaggtgaagaagcctggggcctcagtgaagatttcctgcaaggcttctggctatgcattcactagctactggatgaactgggtgaggcagcgccctggacagggtcttgagtggattggacagatttggcctggagatggtgatactaactacaatggaaagttcaagggtagagtcactatgactgctgacgcatccaccagcacagtctacatggaactcagcagcctgggatctgaggacactgcggtctatttctgtgcaagacgggagactacgacggtaggccgttattactatgctatggactactggggccaagggaccacggtcaccgtctcctcc

SEQ ID NO: 530 - protein, 5 aa, Artificial Sequence
  hCD19 47-A3 HCDR1
SYWMN

SEQ ID NO: 531 - protein, 17 aa, Artificial Sequence
  hCD19 47-A3 HCDR2
QIWPGDGDTNYNGKFKG

SEQ ID NO: 532 - protein, 15 aa, Artificial Sequence
  hCD19 47-A3 HCDR3
RETTTVGRYYYAMDY

SEQ ID NO: 533 - protein, 504 aa, Artificial Sequence
  hCD19 47-A3 LH x I2C HL
DIQMTQSPASLSASVGERVTITCKASQSVDYDGDSYLNWYQQIPGKAPKLLIYDASNLVSGVPSRFSGSGSGTDFTLTISSLQTEDFATYYCQQSTEDPWTFGQGTKVEIKGGGGSGGGGSGGGGSQVQLVQSGAEVKKPGASVKISCKASGYAFTSYWMNWVRQRPGQGLEWIGQIWPGDGDTNYNGKFKGRVTMTADASTSTVYMELSSLGSEDTAVYFCARRETTTVGRYYYAMDYWGQGTTVTVSSGGGGSEVQLVESGGGLVQPGGSLKLSCAASGFTFNKYAMNWVRQAPGKGLEWVARIRSKYNNYATYYADSVKDRFTISRDDSKNTAYLQMNNLKTEDTAVYYCVRHGNFGNSYISYWAYWGQGTLVTVSSGGGGSGGGGSGGGGSQTVVTQEPSLTVSPGGTVTLTCGSSTGAVTSGNYPNWVQQKPGQAPRGLIGGTKFLAPGTPARFSGSLLGGKAALTLSGVQPEDEAEYYCVLWYSNRWVFGGGTKLTVL

SEQ ID NO: 534 - DNA, 1512 bp, Artificial Sequence
  hCD19 47-A3 LH x I2C HL
gacatccagatgacccagtctccagcttctttgtctgcgtctgtaggggagagagtcaccatcacctgcaaggccagccaaagtgttgattatgatggtgatagttatttgaactggtaccaacagataccaggaaaggcacccaaactcctcatctatgatgcatccaatctagtttctggggtcccatccaggtttagtggcagtgggtctgggacagacttcaccctcaccatcagttctctgcagacggaggatttcgcaacctattactgtcagcaaagtactgaggatccgtggacgttcggtcaagggaccaaggtggagatcaaaggtggtggtggttctggcggcggcggctccggtggtggtggttctcaggtgcagctggtccagtctggggctgaggtgaagaagcctggggcctcagtgaagatttcctgcaaggcttctggctatgcattcactagctactggatgaactgggtgaggcagcgccctggacagggtcttgagtggattggacagatttggcctggagatggtgatactaactacaatggaaagttcaagggtagagtcactatgactgctgacgcatccaccagcacagtctacatggaactcagcagcctgggatctgaggacactgcggtctatttctgtgcaagacgggagactacgacggtaggccgttattactatgctatggactactggggccaagggaccacggtcaccgtctcctccggaggtggtggatccgaggtgcagctggtcgagtctggaggaggattggtgcagcctggagggtcattgaaactctcatgtgcagcctctggattcaccttcaataagtacgccatgaactgggtccgccaggctccaggaaagggtttggaatgggttgctcgcataagaagtaaatataataattatgcaacatattatgccgattcagtgaaagacaggttcaccatctccagagatgattcaaaaaacactgcctatctacaaatgaacaacttgaaaactgaggacactgccgtgtactactgtgtgagacatgggaacttcggtaatagctacatatcctactgggcttactggggccaagggactctggtcaccgtctcctcaggtggtggtggttctggcggcggcggctccggtggtggtggttctcagactgttgtgactcaggaaccttcactcaccgtatcacctggtggaacagtcacactcacttgtggctcctcgactggggctgttacatctggcaactacccaaactgggtccaacaaaaaccaggtcaggcaccccgtggtctaataggtgggactaagttcctcgcccccggtactcctgccagattctcaggctccctgcttggaggcaaggctgccctcaccctctcaggggtacagccagaggatgaggcagaatattactgtgttctatggtacagcaaccgctgggtgttcggtggaggaaccaaactgactgtccta

SEQ ID NO: 535 - protein, 111 aa, Artificial Sequence
  HD37-DT  L
DIQLTQSPASLAVSLGQRATISCKASQSVDYDGDTYLNWYQQIPGQPPKLLIYDASNLVSGIPPRFSGSGSGTDFTLNIHPVEKVDAATYHCQQSTEDPWTFGGGTKLEIK

SEQ ID NO: 536 - DNA, 333 bp, Artificial Sequence
  HD37-DT  L
gatatccagctgacccagtctccagcttctttggctgtgtctctagggcagagggccaccatctcctgcaaggccagccaaagtgttgattatgatggtgatacttatttgaactggtaccaacagattccaggacagccacccaaactcctcatctatgatgcatccaatctagtttctgggatcccacccaggtttagtggcagtgggtctgggacagacttcaccctcaacatccatcctgtggagaaggtggatgctgcaacctatcactgtcagcaaagtactgaggatccgtggacgttcggtggagggaccaagctcgagatcaaa

SEQ ID NO: 537 - protein, 15 aa, Artificial Sequence
  HD37-DT  LCDR1
KASQSVDYDGDTYLN

SEQ ID NO: 538 - protein, 7 aa, Artificial Sequence
  HD37-DT  LCDR2
DASNLVS

SEQ ID NO: 539 - protein, 9 aa, Artificial Sequence
  HD37-DT  LCDR3
QQSTEDPWT

SEQ ID NO: 540 - protein, 124 aa, Artificial Sequence; identical to SEQ ID NO: 476
  HD37-DT  H

SEQ ID NO: 541 - DNA, 372 bp, Artificial Sequence; identical to SEQ ID NO: 477
  HD37-DT  H

SEQ ID NO: 542 - protein, 5 aa, Artificial Sequence
  HD37-DT  HCDR1
SYWMN

SEQ ID NO: 543 - protein, 17 aa, Artificial Sequence
  HD37-DT  HCDR2
QIWPGDGDTNYNGKFKG

SEQ ID NO: 544 - protein, 15 aa, Artificial Sequence
  HD37-DT  HCDR3
RETTTVGRYYYAMDY

SEQ ID NO: 545 - protein, 504 aa, Artificial Sequence
  HD37-DT LH x I2C HL
DIQLTQSPASLAVSLGQRATISCKASQSVDYDGDTYLNWYQQIPGQPPKLLIYDASNLVSGIPPRFSGSGSGTDFTLNIHPVEKVDAATYHCQQSTEDPWTFGGGTKLEIKGGGGSGGGGSGGGGSQVQLQQSGAELVRPGSSVKISCKASGYAFSSYWMNWVKQRPGQGLEWIGQIWPGDGDTNYNGKFKGKATLTADESSSTAYMQLSSLASEDSAVYFCARRETTTVGRYYYAMDYWGQGTTVTVSSGGGGSEVQLVESGGGLVQPGGSLKLSCAASGFTFNKYAMNWVRQAPGKGLEWVARIRSKYNNYATYYADSVKDRFTISRDDSKNTAYLQMNNLKTEDTAVYYCVRHGNFGNSYISYWAYWGQGTLVTVSSGGGGSGGGGSGGGGSQTVVTQEPSLTVSPGGTVTLTCGSSTGAVTSGNYPNWVQQKPGQAPRGLIGGTKFLAPGTPARFSGSLLGGKAALTLSGVQPEDEAEYYCVLWYSNRWVFGGGTKLTVL

SEQ ID NO: 546 - DNA, 1512 bp, Artificial Sequence
  HD37-DT LH x I2C HL
gatatccagctgacccagtctccagcttctttggctgtgtctctagggcagagggccaccatctcctgcaaggccagccaaagtgttgattatgatggtgatacttatttgaactggtaccaacagattccaggacagccacccaaactcctcatctatgatgcatccaatctagtttctgggatcccacccaggtttagtggcagtgggtctgggacagacttcaccctcaacatccatcctgtggagaaggtggatgctgcaacctatcactgtcagcaaagtactgaggatccgtggacgttcggtggagggaccaagctcgagatcaaaggtggtggtggttctggcggcggcggctccggtggtggtggttctcaggtgcagctgcagcagtctggggctgagctggtgaggcctgggtcctcagtgaagatttcctgcaaggcttctggctatgcattcagtagctactggatgaactgggtgaagcagaggcctggacagggtcttgagtggattggacagatttggcctggagatggtgatactaactacaatggaaagttcaagggtaaagccactctgactgcagacgaatcctccagcacagcctacatgcaactcagcagcctagcatctgaggactctgcggtctatttctgtgcaagacgggagactacgacggtaggccgttattactatgctatggactactggggccaagggaccacggtcaccgtctcctccggaggtggtggatccgaggtgcagctggtcgagtctggaggaggattggtgcagcctggagggtcattgaaactctcatgtgcagcctctggattcaccttcaataagtacgccatgaactgggtccgccaggctccaggaaagggtttggaatgggttgctcgcataagaagtaaatataataattatgcaacatattatgccgattcagtgaaagacaggttcaccatctccagagatgattcaaaaaacactgcctatctacaaatgaacaacttgaaaactgaggacactgccgtgtactactgtgtgagacatgggaacttcggtaatagctacatatcctactgggcttactggggccaagggactctggtcaccgtctcctcaggtggtggtggttctggcggcggcggctccggtggtggtggttctcagactgttgtgactcaggaaccttcactcaccgtatcacctggtggaacagtcacactcacttgtggctcctcgactggggctgttacatctggcaactacccaaactgggtccaacaaaaaccaggtcaggcaccccgtggtctaataggtgggactaagttcctcgcccccggtactcctgccagattctcaggctccctgcttggaggcaaggctgccctcaccctctcaggggtacagccagaggatgaggcagaatattactgtgttctatggtacagcaaccgctgggtgttcggtggaggaaccaaactgactgtccta

SEQ ID NO: 547 - protein, 111 aa, Artificial Sequence
  HD37-A  L
DIQLTQSPASLAVSLGQRATISCKASQSVDYDGASYLNWYQQIPGQPPKLLIYDASNLVSGIPPRFSGSGSGTDFTLNIHPVEKVDAATYHCQQSTEDPWTFGGGTKLEIK

SEQ ID NO: 548 - DNA, 333 bp, Artificial Sequence
  HD37-A  L
gatatccagctgacccagtctccagcttctttggctgtgtctctagggcagagggccaccatctcctgcaaggccagccaaagtgttgattatgatggtgctagttatttgaactggtaccaacagattccaggacagccacccaaactcctcatctatgatgcatccaatctagtttctgggatcccacccaggtttagtggcagtgggtctgggacagacttcaccctcaacatccatcctgtggagaaggtggatgctgcaacctatcactgtcagcaaagtactgaggatccgtggacgttcggtggagggaccaagctcgagatcaaa

SEQ ID NO: 549 - protein, 15 aa, Artificial Sequence
  HD37-A  LCDR1
KASQSVDYDGASYLN

SEQ ID NO: 550 - protein, 7 aa, Artificial Sequence
  HD37-A  LCDR2
DASNLVS

SEQ ID NO: 551 - protein, 9 aa, Artificial Sequence
  HD37-A  LCDR3
QQSTEDPWT

SEQ ID NO: 552 - protein, 124 aa, Artificial Sequence; identical to SEQ ID NO: 476
  HD37-A  H

SEQ ID NO: 553 - DNA, 372 bp, Artificial Sequence; identical to SEQ ID NO: 477
  HD37-A  H

SEQ ID NO: 554 - protein, 5 aa, Artificial Sequence
  HD37-A  HCDR1
SYWMN

SEQ ID NO: 555 - protein, 17 aa, Artificial Sequence
  HD37-A  HCDR2
QIWPGDGDTNYNGKFKG

SEQ ID NO: 556 - protein, 15 aa, Artificial Sequence
  HD37-A  HCDR3
RETTTVGRYYYAMDY

SEQ ID NO: 557 - protein, 504 aa, Artificial Sequence
  HD37-A LH x I2C HL
DIQLTQSPASLAVSLGQRATISCKASQSVDYDGASYLNWYQQIPGQPPKLLIYDASNLVSGIPPRFSGSGSGTDFTLNIHPVEKVDAATYHCQQSTEDPWTFGGGTKLEIKGGGGSGGGGSGGGGSQVQLQQSGAELVRPGSSVKISCKASGYAFSSYWMNWVKQRPGQGLEWIGQIWPGDGDTNYNGKFKGKATLTADESSSTAYMQLSSLASEDSAVYFCARRETTTVGRYYYAMDYWGQGTTVTVSSGGGGSEVQLVESGGGLVQPGGSLKLSCAASGFTFNKYAMNWVRQAPGKGLEWVARIRSKYNNYATYYADSVKDRFTISRDDSKNTAYLQMNNLKTEDTAVYYCVRHGNFGNSYISYWAYWGQGTLVTVSSGGGGSGGGGSGGGGSQTVVTQEPSLTVSPGGTVTLTCGSSTGAVTSGNYPNWVQQKPGQAPRGLIGGTKFLAPGTPARFSGSLLGGKAALTLSGVQPEDEAEYYCVLWYSNRWVFGGGTKLTVL

SEQ ID NO: 558 - DNA, 1512 bp, Artificial Sequence
  HD37-A LH x I2C HL
gatatccagctgacccagtctccagcttctttggctgtgtctctagggcagagggccaccatctcctgcaaggccagccaaagtgttgattatgatggtgctagttatttgaactggtaccaacagattccaggacagccacccaaactcctcatctatgatgcatccaatctagtttctgggatcccacccaggtttagtggcagtgggtctgggacagacttcaccctcaacatccatcctgtggagaaggtggatgctgcaacctatcactgtcagcaaagtactgaggatccgtggacgttcggtggagggaccaagctcgagatcaaaggtggtggtggttctggcggcggcggctccggtggtggtggttctcaggtgcagctgcagcagtctggggctgagctggtgaggcctgggtcctcagtgaagatttcctgcaaggcttctggctatgcattcagtagctactggatgaactgggtgaagcagaggcctggacagggtcttgagtggattggacagatttggcctggagatggtgatactaactacaatggaaagttcaagggtaaagccactctgactgcagacgaatcctccagcacagcctacatgcaactcagcagcctagcatctgaggactctgcggtctatttctgtgcaagacgggagactacgacggtaggccgttattactatgctatggactactggggccaagggaccacggtcaccgtctcctccggaggtggtggatccgaggtgcagctggtcgagtctggaggaggattggtgcagcctggagggtcattgaaactctcatgtgcagcctctggattcaccttcaataagtacgccatgaactgggtccgccaggctccaggaaagggtttggaatgggttgctcgcataagaagtaaatataataattatgcaacatattatgccgattcagtgaaagacaggttcaccatctccagagatgattcaaaaaacactgcctatctacaaatgaacaacttgaaaactgaggacactgccgtgtactactgtgtgagacatgggaacttcggtaatagctacatatcctactgggcttactggggccaagggactctggtcaccgtctcctcaggtggtggtggttctggcggcggcggctccggtggtggtggttctcagactgttgtgactcaggaaccttcactcaccgtatcacctggtggaacagtcacactcacttgtggctcctcgactggggctgttacatctggcaactacccaaactgggtccaacaaaaaccaggtcaggcaccccgtggtctaataggtgggactaagttcctcgcccccggtactcctgccagattctcaggctccctgcttggaggcaaggctgccctcaccctctcaggggtacagccagaggatgaggcagaatattactgtgttctatggtacagcaaccgctgggtgttcggtggaggaaccaaactgactgtccta

SEQ ID NO: 559 - protein, 111 aa, Artificial Sequence
  HD37-G L
DIQLTQSPASLAVSLGQRATISCKASQSVDYDGGSYLNWYQQIPGQPPKLLIYDASNLVSGIPPRFSGSGSGTDFTLNIHPVEKVDAATYHCQQSTEDPWTFGGGTKLEIK

SEQ ID NO: 560 - DNA, 333 bp, Artificial Sequence
  HD37-G L
gatatccagctgacccagtctccagcttctttggctgtgtctctagggcagagggccaccatctcctgcaaggccagccaaagtgttgattatgatggtggtagttatttgaactggtaccaacagattccaggacagccacccaaactcctcatctatgatgcatccaatctagtttctgggatcccacccaggtttagtggcagtgggtctgggacagacttcaccctcaacatccatcctgtggagaaggtggatgctgcaacctatcactgtcagcaaagtactgaggatccgtggacgttcggtggagggaccaagctcgagatcaaa

SEQ ID NO: 561 - protein, 15 aa, Artificial Sequence
  HD37-G LCDR1
KASQSVDYDGGSYLN

SEQ ID NO: 562 - protein, 7 aa, Artificial Sequence
  HD37-G LCDR2
DASNLVS

SEQ ID NO: 563 - protein, 9 aa, Artificial Sequence
  HD37-G LCDR3
QQSTEDPWT

SEQ ID NO: 564 - protein, 124 aa, Artificial Sequence; identical to SEQ ID NO: 476
  HD37-G H

SEQ ID NO: 565 - DNA, 372 bp, Artificial Sequence; identical to SEQ ID NO: 477
  HD37-G H

SEQ ID NO: 566 - protein, 5 aa, Artificial Sequence
  HD37-G HCDR1
SYWMN

SEQ ID NO: 567 - protein, 17 aa, Artificial Sequence
  HD37-G HCDR2
QIWPGDGDTNYNGKFKG

SEQ ID NO: 568 - protein, 15 aa, Artificial Sequence
  HD37-G HCDR3
RETTTVGRYYYAMDY

SEQ ID NO: 569 - protein, 504 aa, Artificial Sequence
  HD37-G LH x I2C HL
DIQLTQSPASLAVSLGQRATISCKASQSVDYDGGSYLNWYQQIPGQPPKLLIYDASNLVSGIPPRFSGSGSGTDFTLNIHPVEKVDAATYHCQQSTEDPWTFGGGTKLEIKGGGGSGGGGSGGGGSQVQLQQSGAELVRPGSSVKISCKASGYAFSSYWMNWVKQRPGQGLEWIGQIWPGDGDTNYNGKFKGKATLTADESSSTAYMQLSSLASEDSAVYFCARRETTTVGRYYYAMDYWGQGTTVTVSSGGGGSEVQLVESGGGLVQPGGSLKLSCAASGFTFNKYAMNWVRQAPGKGLEWVARIRSKYNNYATYYADSVKDRFTISRDDSKNTAYLQMNNLKTEDTAVYYCVRHGNFGNSYISYWAYWGQGTLVTVSSGGGGSGGGGSGGGGSQTVVTQEPSLTVSPGGTVTLTCGSSTGAVTSGNYPNWVQQKPGQAPRGLIGGTKFLAPGTPARFSGSLLGGKAALTLSGVQPEDEAEYYCVLWYSNRWVFGGGTKLTVL

SEQ ID NO: 570 - DNA, 1512 bp, Artificial Sequence
  HD37-G LH x I2C HL
gatatccagctgacccagtctccagcttctttggctgtgtctctagggcagagggccaccatctcctgcaaggccagccaaagtgttgattatgatggtggtagttatttgaactggtaccaacagattccaggacagccacccaaactcctcatctatgatgcatccaatctagtttctgggatcccacccaggtttagtggcagtgggtctgggacagacttcaccctcaacatccatcctgtggagaaggtggatgctgcaacctatcactgtcagcaaagtactgaggatccgtggacgttcggtggagggaccaagctcgagatcaaaggtggtggtggttctggcggcggcggctccggtggtggtggttctcaggtgcagctgcagcagtctggggctgagctggtgaggcctgggtcctcagtgaagatttcctgcaaggcttctggctatgcattcagtagctactggatgaactgggtgaagcagaggcctggacagggtcttgagtggattggacagatttggcctggagatggtgatactaactacaatggaaagttcaagggtaaagccactctgactgcagacgaatcctccagcacagcctacatgcaactcagcagcctagcatctgaggactctgcggtctatttctgtgcaagacgggagactacgacggtaggccgttattactatgctatggactactggggccaagggaccacggtcaccgtctcctccggaggtggtggatccgaggtgcagctggtcgagtctggaggaggattggtgcagcctggagggtcattgaaactctcatgtgcagcctctggattcaccttcaataagtacgccatgaactgggtccgccaggctccaggaaagggtttggaatgggttgctcgcataagaagtaaatataataattatgcaacatattatgccgattcagtgaaagacaggttcaccatctccagagatgattcaaaaaacactgcctatctacaaatgaacaacttgaaaactgaggacactgccgtgtactactgtgtgagacatgggaacttcggtaatagctacatatcctactgggcttactggggccaagggactctggtcaccgtctcctcaggtggtggtggttctggcggcggcggctccggtggtggtggttctcagactgttgtgactcaggaaccttcactcaccgtatcacctggtggaacagtcacactcacttgtggctcctcgactggggctgttacatctggcaactacccaaactgggtccaacaaaaaccaggtcaggcaccccgtggtctaataggtgggactaagttcctcgcccccggtactcctgccagattctcaggctccctgcttggaggcaaggctgccctcaccctctcaggggtacagccagaggatgaggcagaatattactgtgttctatggtacagcaaccgctgggtgttcggtggaggaaccaaactgactgtccta

SEQ ID NO: 571 - protein, 111 aa, Artificial Sequence
  HD37-S L
DIQLTQSPASLAVSLGQRATISCKASQSVDYDGSSYLNWYQQIPGQPPKLLIYDASNLVSGIPPRFSGSGSGTDFTLNIHPVEKVDAATYHCQQSTEDPWTFGGGTKLEIK

SEQ ID NO: 572 - DNA, 333 bp, Artificial Sequence
  HD37-S L
gatatccagctgacccagtctccagcttctttggctgtgtctctagggcagagggccaccatctcctgcaaggccagccaaagtgttgattatgatggttctagttatttgaactggtaccaacagattccaggacagccacccaaactcctcatctatgatgcatccaatctagtttctgggatcccacccaggtttagtggcagtgggtctgggacagacttcaccctcaacatccatcctgtggagaaggtggatgctgcaacctatcactgtcagcaaagtactgaggatccgtggacgttcggtggagggaccaagctcgagatcaaa

SEQ ID NO: 573 - protein, 15 aa, Artificial Sequence
  HD37-S LCDR1
KASQSVDYDGSSYLN

SEQ ID NO: 574 - protein, 7 aa, Artificial Sequence
  HD37-S LCDR2
DASNLVS

SEQ ID NO: 575 - protein, 9 aa, Artificial Sequence
  HD37-S LCDR3
QQSTEDPWT

SEQ ID NO: 576 - protein, 124 aa, Artificial Sequence; identical to SEQ ID NO: 476
  HD37-S H

SEQ ID NO: 577 - DNA, 372 bp, Artificial Sequence; identical to SEQ ID NO: 477
  HD37-S H

SEQ ID NO: 578 - protein, 5 aa, Artificial Sequence
  HD37-S HCDR1
SYWMN

SEQ ID NO: 579 - protein, 17 aa, Artificial Sequence
  HD37-S HCDR2
QIWPGDGDTNYNGKFKG

SEQ ID NO: 580 - protein, 15 aa, Artificial Sequence
  HD37-S HCDR3
RETTTVGRYYYAMDY

SEQ ID NO: 581 - protein, 504 aa, Artificial Sequence
  HD37-S LH x I2C HL
DIQLTQSPASLAVSLGQRATISCKASQSVDYDGSSYLNWYQQIPGQPPKLLIYDASNLVSGIPPRFSGSGSGTDFTLNIHPVEKVDAATYHCQQSTEDPWTFGGGTKLEIKGGGGSGGGGSGGGGSQVQLQQSGAELVRPGSSVKISCKASGYAFSSYWMNWVKQRPGQGLEWIGQIWPGDGDTNYNGKFKGKATLTADESSSTAYMQLSSLASEDSAVYFCARRETTTVGRYYYAMDYWGQGTTVTVSSGGGGSEVQLVESGGGLVQPGGSLKLSCAASGFTFNKYAMNWVRQAPGKGLEWVARIRSKYNNYATYYADSVKDRFTISRDDSKNTAYLQMNNLKTEDTAVYYCVRHGNFGNSYISYWAYWGQGTLVTVSSGGGGSGGGGSGGGGSQTVVTQEPSLTVSPGGTVTLTCGSSTGAVTSGNYPNWVQQKPGQAPRGLIGGTKFLAPGTPARFSGSLLGGKAALTLSGVQPEDEAEYYCVLWYSNRWVFGGGTKLTVL

SEQ ID NO: 582 - protein, 1512 aa, Artificial Sequence
  HD37-S LH x I2C HL
GATATCCAGCTGACCCAGTCTCCAGCTTCTTTGGCTGTGTCTCTAGGGCAGAGGGCCACCATCTCCTGCAAGGCCAGCCAAAGTGTTGATTATGATGGTTCTAGTTATTTGAACTGGTACCAACAGATTCCAGGACAGCCACCCAAACTCCTCATCTATGATGCATCCAATCTAGTTTCTGGGATCCCACCCAGGTTTAGTGGCAGTGGGTCTGGGACAGACTTCACCCTCAACATCCATCCTGTGGAGAAGGTGGATGCTGCAACCTATCACTGTCAGCAAAGTACTGAGGATCCGTGGACGTTCGGTGGAGGGACCAAGCTCGAGATCAAAGGTGGTGGTGGTTCTGGCGGCGGCGGCTCCGGTGGTGGTGGTTCTCAGGTGCAGCTGCAGCAGTCTGGGGCTGAGCTGGTGAGGCCTGGGTCCTCAGTGAAGATTTCCTGCAAGGCTTCTGGCTATGCATTCAGTAGCTACTGGATGAACTGGGTGAAGCAGAGGCCTGGACAGGGTCTTGAGTGGATTGGACAGATTTGGCCTGGAGATGGTGATACTAACTACAATGGAAAGTTCAAGGGTAAAGCCACTCTGACTGCAGACGAATCCTCCAGCACAGCCTACATGCAACTCAGCAGCCTAGCATCTGAGGACTCTGCGGTCTATTTCTGTGCAAGACGGGAGACTACGACGGTAGGCCGTTATTACTATGCTATGGACTACTGGGGCCAAGGGACCACGGTCACCGTCTCCTCCGGAGGTGGTGGATCCGAGGTGCAGCTGGTCGAGTCTGGAGGAGGATTGGTGCAGCCTGGAGGGTCATTGAAACTCTCATGTGCAGCCTCTGGATTCACCTTCAATAAGTACGCCATGAACTGGGTCCGCCAGGCTCCAGGAAAGGGTTTGGAATGGGTTGCTCGCATAAGAAGTAAATATAATAATTATGCAACATATTATGCCGATTCAGTGAAAGACAGGTTCACCATCTCCAGAGATGATTCAAAAAACACTGCCTATCTACAAATGAACAACTTGAAAACTGAGGACACTGCCGTGTACTACTGTGTGAGACATGGGAACTTCGGTAATAGCTACATATCCTACTGGGCTTACTGGGGCCAAGGGACTCTGGTCACCGTCTCCTCAGGTGGTGGTGGTTCTGGCGGCGGCGGCTCCGGTGGTGGTGGTTCTCAGACTGTTGTGACTCAGGAACCTTCACTCACCGTATCACCTGGTGGAACAGTCACACTCACTTGTGGCTCCTCGACTGGGGCTGTTACATCTGGCAACTACCCAAACTGGGTCCAACAAAAACCAGGTCAGGCACCCCGTGGTCTAATAGGTGGGACTAAGTTCCTCGCCCCCGGTACTCCTGCCAGATTCTCAGGCTCCCTGCTTGGAGGCAAGGCTGCCCTCACCCTCTCAGGGGTACAGCCAGAGGATGAGGCAGAATATTACTGTGTTCTATGGTACAGCAACCGCTGGGTGTTCGGTGGAGGAACCAAACTGACTGTCCTA

SEQ ID NO: 583 - protein, 111 aa, Artificial Sequence
  HD37-T L
DIQLTQSPASLAVSLGQRATISCKASQSVDYDGTSYLNWYQQIPGQPPKLLIYDASNLVSGIPPRFSGSGSGTDFTLNIHPVEKVDAATYHCQQSTEDPWTFGGGTKLEIK

SEQ ID NO: 584 - DNA, 333 bp, Artificial Sequence
  HD37-T L
gatatccagctgacccagtctccagcttctttggctgtgtctctagggcagagggccaccatctcctgcaaggccagccaaagtgttgattatgatggtacaagttatttgaactggtaccaacagattccaggacagccacccaaactcctcatctatgatgcatccaatctagtttctgggatcccacccaggtttagtggcagtgggtctgggacagacttcaccctcaacatccatcctgtggagaaggtggatgctgcaacctatcactgtcagcaaagtactgaggatccgtggacgttcggtggagggaccaagctcgagatcaaa

SEQ ID NO: 585 - protein, 15 aa, Artificial Sequence
  HD37-T LCDR1
KASQSVDYDGTSYLN

SEQ ID NO: 586 - protein, 7 aa, Artificial Sequence
  HD37-T LCDR2
DASNLVS

SEQ ID NO: 587 - protein, 9 aa, Artificial Sequence
  HD37-T LCDR3
QQSTEDPWT

SEQ ID NO: 588 - protein, 124 aa, Artificial Sequence; identical to SEQ ID NO: 476
  HD37-T H

SEQ ID NO: 589 - DNA, 372 bp, Artificial Sequence; identical to SEQ ID NO: 477
  HD37-T H

SEQ ID NO: 590 - protein, 5 aa, Artificial Sequence
  HD37-T HCDR1
SYWMN

SEQ ID NO: 591 - protein, 17 aa, Artificial Sequence
  HD37-T HCDR2
QIWPGDGDTNYNGKFKG

SEQ ID NO: 592 - protein, 15 aa, Artificial Sequence
  HD37-T HCDR3
RETTTVGRYYYAMDY

SEQ ID NO: 593 - protein, 504 aa, Artificial Sequence
  HD37-T LH x I2C HL
DIQLTQSPASLAVSLGQRATISCKASQSVDYDGTSYLNWYQQIPGQPPKLLIYDASNLVSGIPPRFSGSGSGTDFTLNIHPVEKVDAATYHCQQSTEDPWTFGGGTKLEIKGGGGSGGGGSGGGGSQVQLQQSGAELVRPGSSVKISCKASGYAFSSYWMNWVKQRPGQGLEWIGQIWPGDGDTNYNGKFKGKATLTADESSSTAYMQLSSLASEDSAVYFCARRETTTVGRYYYAMDYWGQGTTVTVSSGGGGSEVQLVESGGGLVQPGGSLKLSCAASGFTFNKYAMNWVRQAPGKGLEWVARIRSKYNNYATYYADSVKDRFTISRDDSKNTAYLQMNNLKTEDTAVYYCVRHGNFGNSYISYWAYWGQGTLVTVSSGGGGSGGGGSGGGGSQTVVTQEPSLTVSPGGTVTLTCGSSTGAVTSGNYPNWVQQKPGQAPRGLIGGTKFLAPGTPARFSGSLLGGKAALTLSGVQPEDEAEYYCVLWYSNRWVFGGGTKLTVL

SEQ ID NO: 594 - DNA, 1512 bp, Artificial Sequence
  HD37-T LH x I2C HL
gatatccagctgacccagtctccagcttctttggctgtgtctctagggcagagggccaccatctcctgcaaggccagccaaagtgttgattatgatggtacaagttatttgaactggtaccaacagattccaggacagccacccaaactcctcatctatgatgcatccaatctagtttctgggatcccacccaggtttagtggcagtgggtctgggacagacttcaccctcaacatccatcctgtggagaaggtggatgctgcaacctatcactgtcagcaaagtactgaggatccgtggacgttcggtggagggaccaagctcgagatcaaaggtggtggtggttctggcggcggcggctccggtggtggtggttctcaggtgcagctgcagcagtctggggctgagctggtgaggcctgggtcctcagtgaagatttcctgcaaggcttctggctatgcattcagtagctactggatgaactgggtgaagcagaggcctggacagggtcttgagtggattggacagatttggcctggagatggtgatactaactacaatggaaagttcaagggtaaagccactctgactgcagacgaatcctccagcacagcctacatgcaactcagcagcctagcatctgaggactctgcggtctatttctgtgcaagacgggagactacgacggtaggccgttattactatgctatggactactggggccaagggaccacggtcaccgtctcctccggaggtggtggatccgaggtgcagctggtcgagtctggaggaggattggtgcagcctggagggtcattgaaactctcatgtgcagcctctggattcaccttcaataagtacgccatgaactgggtccgccaggctccaggaaagggtttggaatgggttgctcgcataagaagtaaatataataattatgcaacatattatgccgattcagtgaaagacaggttcaccatctccagagatgattcaaaaaacactgcctatctacaaatgaacaacttgaaaactgaggacactgccgtgtactactgtgtgagacatgggaacttcggtaatagctacatatcctactgggcttactggggccaagggactctggtcaccgtctcctcaggtggtggtggttctggcggcggcggctccggtggtggtggttctcagactgttgtgactcaggaaccttcactcaccgtatcacctggtggaacagtcacactcacttgtggctcctcgactggggctgttacatctggcaactacccaaactgggtccaacaaaaaccaggtcaggcaccccgtggtctaataggtgggactaagttcctcgcccccggtactcctgccagattctcaggctccctgcttggaggcaaggctgccctcaccctctcaggggtacagccagaggatgaggcagaatattactgtgttctatggtacagcaaccgctgggtgttcggtggaggaaccaaactgactgtccta

SEQ ID NO: 595 - protein, 111 aa, Artificial Sequence
  HD37-I L
DIQLTQSPASLAVSLGQRATISCKASQSVDYDGISYLNWYQQIPGQPPKLLIYDASNLVSGIPPRFSGSGSGTDFTLNIHPVEKVDAATYHCQQSTEDPWTFGGGTKLEIK

SEQ ID NO: 596 - DNA, 333 bp, Artificial Sequence
  HD37-I L
gatatccagctgacccagtctccagcttctttggctgtgtctctagggcagagggccaccatctcctgcaaggccagccaaagtgttgattatgatggtatcagttatttgaactggtaccaacagattccaggacagccacccaaactcctcatctatgatgcatccaatctagtttctgggatcccacccaggtttagtggcagtgggtctgggacagacttcaccctcaacatccatcctgtggagaaggtggatgctgcaacctatcactgtcagcaaagtactgaggatccgtggacgttcggtggagggaccaagctcgagatcaaa

SEQ ID NO: 597 - protein, 15 aa, Artificial Sequence
  HD37-I LCDR1
KASQSVDYDGISYLN

SEQ ID NO: 598 - protein, 7 aa, Artificial Sequence
  HD37-I LCDR2
DASNLVS

SEQ ID NO: 599 - protein, 9 aa, Artificial Sequence
  HD37-I LCDR3
QQSTEDPWT

SEQ ID NO: 600 - protein, 124 aa, Artificial Sequence; identical to SEQ ID NO: 476
  HD37-I H

SEQ ID NO: 601 - DNA, 372 bp, Artificial Sequence; identical to SEQ ID NO: 477
  HD37-I H

SEQ ID NO: 602 - protein, 5 aa, Artificial Sequence
  HD37-I HCDR1
SYWMN

SEQ ID NO: 603 - protein, 17 aa, Artificial Sequence
  HD37-I HCDR2
QIWPGDGDTNYNGKFKG

SEQ ID NO: 604 - protein, 15 aa, Artificial Sequence
  HD37-I HCDR3
RETTTVGRYYYAMDY

SEQ ID NO: 605 - protein, 504 aa, Artificial Sequence
  HD37-I LH x I2C HL
DIQLTQSPASLAVSLGQRATISCKASQSVDYDGISYLNWYQQIPGQPPKLLIYDASNLVSGIPPRFSGSGSGTDFTLNIHPVEKVDAATYHCQQSTEDPWTFGGGTKLEIKGGGGSGGGGSGGGGSQVQLQQSGAELVRPGSSVKISCKASGYAFSSYWMNWVKQRPGQGLEWIGQIWPGDGDTNYNGKFKGKATLTADESSSTAYMQLSSLASEDSAVYFCARRETTTVGRYYYAMDYWGQGTTVTVSSGGGGSEVQLVESGGGLVQPGGSLKLSCAASGFTFNKYAMNWVRQAPGKGLEWVARIRSKYNNYATYYADSVKDRFTISRDDSKNTAYLQMNNLKTEDTAVYYCVRHGNFGNSYISYWAYWGQGTLVTVSSGGGGSGGGGSGGGGSQTVVTQEPSLTVSPGGTVTLTCGSSTGAVTSGNYPNWVQQKPGQAPRGLIGGTKFLAPGTPARFSGSLLGGKAALTLSGVQPEDEAEYYCVLWYSNRWVFGGGTKLTVL

SEQ ID NO: 606 - DNA, 1512 bp, Artificial Sequence
  HD37-I LH x I2C HL
gatatccagctgacccagtctccagcttctttggctgtgtctctagggcagagggccaccatctcctgcaaggccagccaaagtgttgattatgatggtatcagttatttgaactggtaccaacagattccaggacagccacccaaactcctcatctatgatgcatccaatctagtttctgggatcccacccaggtttagtggcagtgggtctgggacagacttcaccctcaacatccatcctgtggagaaggtggatgctgcaacctatcactgtcagcaaagtactgaggatccgtggacgttcggtggagggaccaagctcgagatcaaaggtggtggtggttctggcggcggcggctccggtggtggtggttctcaggtgcagctgcagcagtctggggctgagctggtgaggcctgggtcctcagtgaagatttcctgcaaggcttctggctatgcattcagtagctactggatgaactgggtgaagcagaggcctggacagggtcttgagtggattggacagatttggcctggagatggtgatactaactacaatggaaagttcaagggtaaagccactctgactgcagacgaatcctccagcacagcctacatgcaactcagcagcctagcatctgaggactctgcggtctatttctgtgcaagacgggagactacgacggtaggccgttattactatgctatggactactggggccaagggaccacggtcaccgtctcctccggaggtggtggatccgaggtgcagctggtcgagtctggaggaggattggtgcagcctggagggtcattgaaactctcatgtgcagcctctggattcaccttcaataagtacgccatgaactgggtccgccaggctccaggaaagggtttggaatgggttgctcgcataagaagtaaatataataattatgcaacatattatgccgattcagtgaaagacaggttcaccatctccagagatgattcaaaaaacactgcctatctacaaatgaacaacttgaaaactgaggacactgccgtgtactactgtgtgagacatgggaacttcggtaatagctacatatcctactgggcttactggggccaagggactctggtcaccgtctcctcaggtggtggtggttctggcggcggcggctccggtggtggtggttctcagactgttgtgactcaggaaccttcactcaccgtatcacctggtggaacagtcacactcacttgtggctcctcgactggggctgttacatctggcaactacccaaactgggtccaacaaaaaccaggtcaggcaccccgtggtctaataggtgggactaagttcctcgcccccggtactcctgccagattctcaggctccctgcttggaggcaaggctgccctcaccctctcaggggtacagccagaggatgaggcagaatattactgtgttctatggtacagcaaccgctgggtgttcggtggaggaaccaaactgactgtccta

SEQ ID NO: 607 - protein, 111 aa, Artificial Sequence
  HD37-L L
DIQLTQSPASLAVSLGQRATISCKASQSVDYDGLSYLNWYQQIPGQPPKLLIYDASNLVSGIPPRFSGSGSGTDFTLNIHPVEKVDAATYHCQQSTEDPWTFGGGTKLEIK

SEQ ID NO: 608 - DNA, 333 bp, Artificial Sequence
  HD37-L L
gatatccagctgacccagtctccagcttctttggctgtgtctctagggcagagggccaccatctcctgcaaggccagccaaagtgttgattatgatggtctgagttatttgaactggtaccaacagattccaggacagccacccaaactcctcatctatgatgcatccaatctagtttctgggatcccacccaggtttagtggcagtgggtctgggacagacttcaccctcaacatccatcctgtggagaaggtggatgctgcaacctatcactgtcagcaaagtactgaggatccgtggacgttcggtggagggaccaagctcgagatcaaa

SEQ ID NO: 609 - protein, 15 aa, Artificial Sequence
  HD37-L LCDR1
KASQSVDYDGLSYLN

SEQ ID NO: 610 - protein, 7 aa, Artificial Sequence
  HD37-L LCDR2
DASNLVS

SEQ ID NO: 611 - protein, 9 aa, Artificial Sequence
  HD37-L LCDR3
QQSTEDPWT

SEQ ID NO: 612 - protein, 124 aa, Artificial Sequence; identical to SEQ ID NO: 476
  HD37-L H

SEQ ID NO: 613 - DNA, 372 bp, Artificial Sequence; identical to SEQ ID NO: 477
  HD37-L H

SEQ ID NO: 614 - protein, 5 aa, Artificial Sequence
  HD37-L HCDR1
SYWMN

SEQ ID NO: 615 - protein, 17 aa, Artificial Sequence
  HD37-L HCDR2
QIWPGDGDTNYNGKFKG

SEQ ID NO: 616 - protein, 15 aa, Artificial Sequence
  HD37-L HCDR3
RETTTVGRYYYAMDY

SEQ ID NO: 617 - protein, 504 aa, Artificial Sequence
  HD37-L LH x I2C HL
DIQLTQSPASLAVSLGQRATISCKASQSVDYDGLSYLNWYQQIPGQPPKLLIYDASNLVSGIPPRFSGSGSGTDFTLNIHPVEKVDAATYHCQQSTEDPWTFGGGTKLEIKGGGGSGGGGSGGGGSQVQLQQSGAELVRPGSSVKISCKASGYAFSSYWMNWVKQRPGQGLEWIGQIWPGDGDTNYNGKFKGKATLTADESSSTAYMQLSSLASEDSAVYFCARRETTTVGRYYYAMDYWGQGTTVTVSSGGGGSEVQLVESGGGLVQPGGSLKLSCAASGFTFNKYAMNWVRQAPGKGLEWVARIRSKYNNYATYYADSVKDRFTISRDDSKNTAYLQMNNLKTEDTAVYYCVRHGNFGNSYISYWAYWGQGTLVTVSSGGGGSGGGGSGGGGSQTVVTQEPSLTVSPGGTVTLTCGSSTGAVTSGNYPNWVQQKPGQAPRGLIGGTKFLAPGTPARFSGSLLGGKAALTLSGVQPEDEAEYYCVLWYSNRWVFGGGTKLTVL

SEQ ID NO: 618 - DNA, 1512 bp, Artificial Sequence
  HD37-L LH x I2C HL
gatatccagctgacccagtctccagcttctttggctgtgtctctagggcagagggccaccatctcctgcaaggccagccaaagtgttgattatgatggtctgagttatttgaactggtaccaacagattccaggacagccacccaaactcctcatctatgatgcatccaatctagtttctgggatcccacccaggtttagtggcagtgggtctgggacagacttcaccctcaacatccatcctgtggagaaggtggatgctgcaacctatcactgtcagcaaagtactgaggatccgtggacgttcggtggagggaccaagctcgagatcaaaggtggtggtggttctggcggcggcggctccggtggtggtggttctcaggtgcagctgcagcagtctggggctgagctggtgaggcctgggtcctcagtgaagatttcctgcaaggcttctggctatgcattcagtagctactggatgaactgggtgaagcagaggcctggacagggtcttgagtggattggacagatttggcctggagatggtgatactaactacaatggaaagttcaagggtaaagccactctgactgcagacgaatcctccagcacagcctacatgcaactcagcagcctagcatctgaggactctgcggtctatttctgtgcaagacgggagactacgacggtaggccgttattactatgctatggactactggggccaagggaccacggtcaccgtctcctccggaggtggtggatccgaggtgcagctggtcgagtctggaggaggattggtgcagcctggagggtcattgaaactctcatgtgcagcctctggattcaccttcaataagtacgccatgaactgggtccgccaggctccaggaaagggtttggaatgggttgctcgcataagaagtaaatataataattatgcaacatattatgccgattcagtgaaagacaggttcaccatctccagagatgattcaaaaaacactgcctatctacaaatgaacaacttgaaaactgaggacactgccgtgtactactgtgtgagacatgggaacttcggtaatagctacatatcctactgggcttactggggccaagggactctggtcaccgtctcctcaggtggtggtggttctggcggcggcggctccggtggtggtggttctcagactgttgtgactcaggaaccttcactcaccgtatcacctggtggaacagtcacactcacttgtggctcctcgactggggctgttacatctggcaactacccaaactgggtccaacaaaaaccaggtcaggcaccccgtggtctaataggtgggactaagttcctcgcccccggtactcctgccagattctcaggctccctgcttggaggcaaggctgccctcaccctctcaggggtacagccagaggatgaggcagaatattactgtgttctatggtacagcaaccgctgggtgttcggtggaggaaccaaactgactgtccta

SEQ ID NO: 619 - protein, 111 aa, Artificial Sequence
  HD37-V L
DIQLTQSPASLAVSLGQRATISCKASQSVDYDGVSYLNWYQQIPGQPPKLLIYDASNLVSGIPPRFSGSGSGTDFTLNIHPVEKVDAATYHCQQSTEDPWTFGGGTKLEIK

SEQ ID NO: 620 - DNA, 333 bp, Artificial Sequence
  HD37-V L
gatatccagctgacccagtctccagcttctttggctgtgtctctagggcagagggccaccatctcctgcaaggccagccaaagtgttgattatgatggtgtcagttatttgaactggtaccaacagattccaggacagccacccaaactcctcatctatgatgcatccaatctagtttctgggatcccacccaggtttagtggcagtgggtctgggacagacttcaccctcaacatccatcctgtggagaaggtggatgctgcaacctatcactgtcagcaaagtactgaggatccgtggacgttcggtggagggaccaagctcgagatcaaa

SEQ ID NO: 621 - protein, 15 aa, Artificial Sequence
  HD37-V LCDR1
KASQSVDYDGVSYLN

SEQ ID NO: 622 - protein, 7 aa, Artificial Sequence
  HD37-V LCDR2
DASNLVS

SEQ ID NO: 623 - protein, 9 aa, Artificial Sequence
  HD37-V LCDR3
QQSTEDPWT

SEQ ID NO: 624 - protein, 124 aa, Artificial Sequence; identical to SEQ ID NO: 476
  HD37-V H

SEQ ID NO: 625 - DNA, 372 bp, Artificial Sequence; identical to SEQ ID NO: 477
  HD37-V H

SEQ ID NO: 626 - protein, 5 aa, Artificial Sequence
  HD37-V HCDR1
SYWMN

SEQ ID NO: 627 - protein, 17 aa, Artificial Sequence
  HD37-V HCDR2
QIWPGDGDTNYNGKFKG

SEQ ID NO: 628 - protein, 15 aa, Artificial Sequence
  HD37-V HCDR3
RETTTVGRYYYAMDY

SEQ ID NO: 629 - protein, 504 aa, Artificial Sequence
  HD37-V LH x I2C HL
DIQLTQSPASLAVSLGQRATISCKASQSVDYDGVSYLNWYQQIPGQPPKLLIYDASNLVSGIPPRFSGSGSGTDFTLNIHPVEKVDAATYHCQQSTEDPWTFGGGTKLEIKGGGGSGGGGSGGGGSQVQLQQSGAELVRPGSSVKISCKASGYAFSSYWMNWVKQRPGQGLEWIGQIWPGDGDTNYNGKFKGKATLTADESSSTAYMQLSSLASEDSAVYFCARRETTTVGRYYYAMDYWGQGTTVTVSSGGGGSEVQLVESGGGLVQPGGSLKLSCAASGFTFNKYAMNWVRQAPGKGLEWVARIRSKYNNYATYYADSVKDRFTISRDDSKNTAYLQMNNLKTEDTAVYYCVRHGNFGNSYISYWAYWGQGTLVTVSSGGGGSGGGGSGGGGSQTVVTQEPSLTVSPGGTVTLTCGSSTGAVTSGNYPNWVQQKPGQAPRGLIGGTKFLAPGTPARFSGSLLGGKAALTLSGVQPEDEAEYYCVLWYSNRWVFGGGTKLTVL

SEQ ID NO: 630 - DNA, 1512 bp, Artificial Sequence
  HD37-V LH x I2C HL
gatatccagctgacccagtctccagcttctttggctgtgtctctagggcagagggccaccatctcctgcaaggccagccaaagtgttgattatgatggtgtcagttatttgaactggtaccaacagattccaggacagccacccaaactcctcatctatgatgcatccaatctagtttctgggatcccacccaggtttagtggcagtgggtctgggacagacttcaccctcaacatccatcctgtggagaaggtggatgctgcaacctatcactgtcagcaaagtactgaggatccgtggacgttcggtggagggaccaagctcgagatcaaaggtggtggtggttctggcggcggcggctccggtggtggtggttctcaggtgcagctgcagcagtctggggctgagctggtgaggcctgggtcctcagtgaagatttcctgcaaggcttctggctatgcattcagtagctactggatgaactgggtgaagcagaggcctggacagggtcttgagtggattggacagatttggcctggagatggtgatactaactacaatggaaagttcaagggtaaagccactctgactgcagacgaatcctccagcacagcctacatgcaactcagcagcctagcatctgaggactctgcggtctatttctgtgcaagacgggagactacgacggtaggccgttattactatgctatggactactggggccaagggaccacggtcaccgtctcctccggaggtggtggatccgaggtgcagctggtcgagtctggaggaggattggtgcagcctggagggtcattgaaactctcatgtgcagcctctggattcaccttcaataagtacgccatgaactgggtccgccaggctccaggaaagggtttggaatgggttgctcgcataagaagtaaatataataattatgcaacatattatgccgattcagtgaaagacaggttcaccatctccagagatgattcaaaaaacactgcctatctacaaatgaacaacttgaaaactgaggacactgccgtgtactactgtgtgagacatgggaacttcggtaatagctacatatcctactgggcttactggggccaagggactctggtcaccgtctcctcaggtggtggtggttctggcggcggcggctccggtggtggtggttctcagactgttgtgactcaggaaccttcactcaccgtatcacctggtggaacagtcacactcacttgtggctcctcgactggggctgttacatctggcaactacccaaactgggtccaacaaaaaccaggtcaggcaccccgtggtctaataggtgggactaagttcctcgcccccggtactcctgccagattctcaggctccctgcttggaggcaaggctgccctcaccctctcaggggtacagccagaggatgaggcagaatattactgtgttctatggtacagcaaccgctgggtgttcggtggaggaaccaaactgactgtccta

SEQ ID NO: 631 - protein, 111 aa, Artificial Sequence
  HD37-E L
DIQLTQSPASLAVSLGQRATISCKASQSVDYDGESYLNWYQQIPGQPPKLLIYDASNLVSGIPPRFSGSGSGTDFTLNIHPVEKVDAATYHCQQSTEDPWTFGGGTKLEIK

SEQ ID NO: 632 - DNA, 333 bp, Artificial Sequence
  HD37-E L
gatatccagctgacccagtctccagcttctttggctgtgtctctagggcagagggccaccatctcctgcaaggccagccaaagtgttgattatgatggtgagagttatttgaactggtaccaacagattccaggacagccacccaaactcctcatctatgatgcatccaatctagtttctgggatcccacccaggtttagtggcagtgggtctgggacagacttcaccctcaacatccatcctgtggagaaggtggatgctgcaacctatcactgtcagcaaagtactgaggatccgtggacgttcggtggagggaccaagctcgagatcaaa

SEQ ID NO: 633 - protein, 15 aa, Artificial Sequence
  HD37-E LCDR1
KASQSVDYDGESYLN

SEQ ID NO: 634 - protein, 7 aa, Artificial Sequence
  HD37-E LCDR2
DASNLVS

SEQ ID NO: 635 - protein, 9 aa, Artificial Sequence
  HD37-E LCDR3
QQSTEDPWT

SEQ ID NO: 636 - protein, 124 aa, Artificial Sequence; identical to SEQ ID NO: 476
  HD37-E H

SEQ ID NO: 637 - DNA, 372 bp, Artificial Sequence; identical to SEQ ID NO: 477
  HD37-E H

SEQ ID NO: 638 - protein, 5 aa, Artificial Sequence
  HD37-E HCDR1
SYWMN

SEQ ID NO: 639 - protein, 17 aa, Artificial Sequence
  HD37-E HCDR2
QIWPGDGDTNYNGKFKG

SEQ ID NO: 640 - protein, 15 aa, Artificial Sequence
  HD37-E HCDR3
RETTTVGRYYYAMDY

SEQ ID NO: 641 - protein, 504 aa, Artificial Sequence
  HD37-E LH x I2C HL
DIQLTQSPASLAVSLGQRATISCKASQSVDYDGESYLNWYQQIPGQPPKLLIYDASNLVSGIPPRFSGSGSGTDFTLNIHPVEKVDAATYHCQQSTEDPWTFGGGTKLEIKGGGGSGGGGSGGGGSQVQLQQSGAELVRPGSSVKISCKASGYAFSSYWMNWVKQRPGQGLEWIGQIWPGDGDTNYNGKFKGKATLTADESSSTAYMQLSSLASEDSAVYFCARRETTTVGRYYYAMDYWGQGTTVTVSSGGGGSEVQLVESGGGLVQPGGSLKLSCAASGFTFNKYAMNWVRQAPGKGLEWVARIRSKYNNYATYYADSVKDRFTISRDDSKNTAYLQMNNLKTEDTAVYYCVRHGNFGNSYISYWAYWGQGTLVTVSSGGGGSGGGGSGGGGSQTVVTQEPSLTVSPGGTVTLTCGSSTGAVTSGNYPNWVQQKPGQAPRGLIGGTKFLAPGTPARFSGSLLGGKAALTLSGVQPEDEAEYYCVLWYSNRWVFGGGTKLTVL

SEQ ID NO: 642 - DNA, 1512 bp, Artificial Sequence
  HD37-E LH x I2C HL
gatatccagctgacccagtctccagcttctttggctgtgtctctagggcagagggccaccatctcctgcaaggccagccaaagtgttgattatgatggtgagagttatttgaactggtaccaacagattccaggacagccacccaaactcctcatctatgatgcatccaatctagtttctgggatcccacccaggtttagtggcagtgggtctgggacagacttcaccctcaacatccatcctgtggagaaggtggatgctgcaacctatcactgtcagcaaagtactgaggatccgtggacgttcggtggagggaccaagctcgagatcaaaggtggtggtggttctggcggcggcggctccggtggtggtggttctcaggtgcagctgcagcagtctggggctgagctggtgaggcctgggtcctcagtgaagatttcctgcaaggcttctggctatgcattcagtagctactggatgaactgggtgaagcagaggcctggacagggtcttgagtggattggacagatttggcctggagatggtgatactaactacaatggaaagttcaagggtaaagccactctgactgcagacgaatcctccagcacagcctacatgcaactcagcagcctagcatctgaggactctgcggtctatttctgtgcaagacgggagactacgacggtaggccgttattactatgctatggactactggggccaagggaccacggtcaccgtctcctccggaggtggtggatccgaggtgcagctggtcgagtctggaggaggattggtgcagcctggagggtcattgaaactctcatgtgcagcctctggattcaccttcaataagtacgccatgaactgggtccgccaggctccaggaaagggtttggaatgggttgctcgcataagaagtaaatataataattatgcaacatattatgccgattcagtgaaagacaggttcaccatctccagagatgattcaaaaaacactgcctatctacaaatgaacaacttgaaaactgaggacactgccgtgtactactgtgtgagacatgggaacttcggtaatagctacatatcctactgggcttactggggccaagggactctggtcaccgtctcctcaggtggtggtggttctggcggcggcggctccggtggtggtggttctcagactgttgtgactcaggaaccttcactcaccgtatcacctggtggaacagtcacactcacttgtggctcctcgactggggctgttacatctggcaactacccaaactgggtccaacaaaaaccaggtcaggcaccccgtggtctaataggtgggactaagttcctcgcccccggtactcctgccagattctcaggctccctgcttggaggcaaggctgccctcaccctctcaggggtacagccagaggatgaggcagaatattactgtgttctatggtacagcaaccgctgggtgttcggtggaggaaccaaactgactgtccta

SEQ ID NO: 643 - protein, 111 aa, Artificial Sequence
  HD37-Q L
DIQLTQSPASLAVSLGQRATISCKASQSVDYDGQSYLNWYQQIPGQPPKLLIYDASNLVSGIPPRFSGSGSGTDFTLNIHPVEKVDAATYHCQQSTEDPWTFGGGTKLEIK

SEQ ID NO: 644 - DNA, 333 bp, Artificial Sequence
  HD37-Q L
gatatccagctgacccagtctccagcttctttggctgtgtctctagggcagagggccaccatctcctgcaaggccagccaaagtgttgattatgatggtcagagttatttgaactggtaccaacagattccaggacagccacccaaactcctcatctatgatgcatccaatctagtttctgggatcccacccaggtttagtggcagtgggtctgggacagacttcaccctcaacatccatcctgtggagaaggtggatgctgcaacctatcactgtcagcaaagtactgaggatccgtggacgttcggtggagggaccaagctcgagatcaaa

SEQ ID NO: 645 - protein, 15 aa, Artificial Sequence
  HD37-Q LCDR1
KASQSVDYDGQSYLN

SEQ ID NO: 646 - protein, 7 aa, Artificial Sequence
  HD37-Q LCDR2
DASNLVS

SEQ ID NO: 647 - protein, 9 aa, Artificial Sequence
  HD37-Q LCDR3
QQSTEDPWT

SEQ ID NO: 648 - protein, 124 aa, Artificial Sequence; identical to SEQ ID NO: 476
  HD37-Q H

SEQ ID NO: 649 - DNA, 372 bp, Artificial Sequence; identical to SEQ ID NO: 477
  HD37-Q H

SEQ ID NO: 650 - protein, 5 aa, Artificial Sequence
  HD37-Q HCDR1
SYWMN

SEQ ID NO: 651 - protein, 17 aa, Artificial Sequence
  HD37-Q HCDR2
QIWPGDGDTNYNGKFKG

SEQ ID NO: 652 - protein, 15 aa, Artificial Sequence
  HD37-Q HCDR3
RETTTVGRYYYAMDY

SEQ ID NO: 653 - protein, 504 aa, Artificial Sequence
  HD37-Q LH x I2C HL
DIQLTQSPASLAVSLGQRATISCKASQSVDYDGQSYLNWYQQIPGQPPKLLIYDASNLVSGIPPRFSGSGSGTDFTLNIHPVEKVDAATYHCQQSTEDPWTFGGGTKLEIKGGGGSGGGGSGGGGSQVQLQQSGAELVRPGSSVKISCKASGYAFSSYWMNWVKQRPGQGLEWIGQIWPGDGDTNYNGKFKGKATLTADESSSTAYMQLSSLASEDSAVYFCARRETTTVGRYYYAMDYWGQGTTVTVSSGGGGSEVQLVESGGGLVQPGGSLKLSCAASGFTFNKYAMNWVRQAPGKGLEWVARIRSKYNNYATYYADSVKDRFTISRDDSKNTAYLQMNNLKTEDTAVYYCVRHGNFGNSYISYWAYWGQGTLVTVSSGGGGSGGGGSGGGGSQTVVTQEPSLTVSPGGTVTLTCGSSTGAVTSGNYPNWVQQKPGQAPRGLIGGTKFLAPGTPARFSGSLLGGKAALTLSGVQPEDEAEYYCVLWYSNRWVFGGGTKLTVL

SEQ ID NO: 654 - DNA, 1512 bp, Artificial Sequence
  HD37-Q LH x I2C HL
gatatccagctgacccagtctccagcttctttggctgtgtctctagggcagagggccaccatctcctgcaaggccagccaaagtgttgattatgatggtcagagttatttgaactggtaccaacagattccaggacagccacccaaactcctcatctatgatgcatccaatctagtttctgggatcccacccaggtttagtggcagtgggtctgggacagacttcaccctcaacatccatcctgtggagaaggtggatgctgcaacctatcactgtcagcaaagtactgaggatccgtggacgttcggtggagggaccaagctcgagatcaaaggtggtggtggttctggcggcggcggctccggtggtggtggttctcaggtgcagctgcagcagtctggggctgagctggtgaggcctgggtcctcagtgaagatttcctgcaaggcttctggctatgcattcagtagctactggatgaactgggtgaagcagaggcctggacagggtcttgagtggattggacagatttggcctggagatggtgatactaactacaatggaaagttcaagggtaaagccactctgactgcagacgaatcctccagcacagcctacatgcaactcagcagcctagcatctgaggactctgcggtctatttctgtgcaagacgggagactacgacggtaggccgttattactatgctatggactactggggccaagggaccacggtcaccgtctcctccggaggtggtggatccgaggtgcagctggtcgagtctggaggaggattggtgcagcctggagggtcattgaaactctcatgtgcagcctctggattcaccttcaataagtacgccatgaactgggtccgccaggctccaggaaagggtttggaatgggttgctcgcataagaagtaaatataataattatgcaacatattatgccgattcagtgaaagacaggttcaccatctccagagatgattcaaaaaacactgcctatctacaaatgaacaacttgaaaactgaggacactgccgtgtactactgtgtgagacatgggaacttcggtaatagctacatatcctactgggcttactggggccaagggactctggtcaccgtctcctcaggtggtggtggttctggcggcggcggctccggtggtggtggttctcagactgttgtgactcaggaaccttcactcaccgtatcacctggtggaacagtcacactcacttgtggctcctcgactggggctgttacatctggcaactacccaaactgggtccaacaaaaaccaggtcaggcaccccgtggtctaataggtgggactaagttcctcgcccccggtactcctgccagattctcaggctccctgcttggaggcaaggctgccctcaccctctcaggggtacagccagaggatgaggcagaatattactgtgttctatggtacagcaaccgctgggtgttcggtggaggaaccaaactgactgtccta

SEQ ID NO: 655 - protein, 111 aa, Artificial Sequence
  HD37-N L
DIQLTQSPASLAVSLGQRATISCKASQSVDYDGNSYLNWYQQIPGQPPKLLIYDASNLVSGIPPRFSGSGSGTDFTLNIHPVEKVDAATYHCQQSTEDPWTFGGGTKLEIK

SEQ ID NO: 656 - DNA, 333 bp, Artificial Sequence
  HD37-N L
gatatccagctgacccagtctccagcttctttggctgtgtctctagggcagagggccaccatctcctgcaaggccagccaaagtgttgattatgatggtaacagttatttgaactggtaccaacagattccaggacagccacccaaactcctcatctatgatgcatccaatctagtttctgggatcccacccaggtttagtggcagtgggtctgggacagacttcaccctcaacatccatcctgtggagaaggtggatgctgcaacctatcactgtcagcaaagtactgaggatccgtggacgttcggtggagggaccaagctcgagatcaaa

SEQ ID NO: 657 - protein, 15 aa, Artificial Sequence
  HD37-N LCDR1
KASQSVDYDGNSYLN

SEQ ID NO: 658 - protein, 7 aa, Artificial Sequence
  HD37-N LCDR2
DASNLVS

SEQ ID NO: 659 - protein, 9 aa, Artificial Sequence
  HD37-N LCDR3
QQSTEDPWT

SEQ ID NO: 660 - protein, 124 aa, Artificial Sequence; identical to SEQ ID NO: 476
  HD37-N H

SEQ ID NO: 661 - DNA, 372 bp, Artificial Sequence; identical to SEQ ID NO: 477
  HD37-N H

SEQ ID NO: 662 - protein, 5 aa, Artificial Sequence
  HD37-N HCDR1
SYWMN

SEQ ID NO: 663 - protein, 17 aa, Artificial Sequence
  HD37-N HCDR2
QIWPGDGDTNYNGKFKG

SEQ ID NO: 664 - protein, 15 aa, Artificial Sequence
  HD37-N HCDR3
RETTTVGRYYYAMDY

SEQ ID NO: 665 - protein, 504 aa, Artificial Sequence
  HD37-N LH x I2C HL
DIQLTQSPASLAVSLGQRATISCKASQSVDYDGNSYLNWYQQIPGQPPKLLIYDASNLVSGIPPRFSGSGSGTDFTLNIHPVEKVDAATYHCQQSTEDPWTFGGGTKLEIKGGGGSGGGGSGGGGSQVQLQQSGAELVRPGSSVKISCKASGYAFSSYWMNWVKQRPGQGLEWIGQIWPGDGDTNYNGKFKGKATLTADESSSTAYMQLSSLASEDSAVYFCARRETTTVGRYYYAMDYWGQGTTVTVSSGGGGSEVQLVESGGGLVQPGGSLKLSCAASGFTFNKYAMNWVRQAPGKGLEWVARIRSKYNNYATYYADSVKDRFTISRDDSKNTAYLQMNNLKTEDTAVYYCVRHGNFGNSYISYWAYWGQGTLVTVSSGGGGSGGGGSGGGGSQTVVTQEPSLTVSPGGTVTLTCGSSTGAVTSGNYPNWVQQKPGQAPRGLIGGTKFLAPGTPARFSGSLLGGKAALTLSGVQPEDEAEYYCVLWYSNRWVFGGGTKLTVL

SEQ ID NO: 666 - DNA, 1512 bp, Artificial Sequence
  HD37-N LH x I2C HL
gatatccagctgacccagtctccagcttctttggctgtgtctctagggcagagggccaccatctcctgcaaggccagccaaagtgttgattatgatggtaacagttatttgaactggtaccaacagattccaggacagccacccaaactcctcatctatgatgcatccaatctagtttctgggatcccacccaggtttagtggcagtgggtctgggacagacttcaccctcaacatccatcctgtggagaaggtggatgctgcaacctatcactgtcagcaaagtactgaggatccgtggacgttcggtggagggaccaagctcgagatcaaaggtggtggtggttctggcggcggcggctccggtggtggtggttctcaggtgcagctgcagcagtctggggctgagctggtgaggcctgggtcctcagtgaagatttcctgcaaggcttctggctatgcattcagtagctactggatgaactgggtgaagcagaggcctggacagggtcttgagtggattggacagatttggcctggagatggtgatactaactacaatggaaagttcaagggtaaagccactctgactgcagacgaatcctccagcacagcctacatgcaactcagcagcctagcatctgaggactctgcggtctatttctgtgcaagacgggagactacgacggtaggccgttattactatgctatggactactggggccaagggaccacggtcaccgtctcctccggaggtggtggatccgaggtgcagctggtcgagtctggaggaggattggtgcagcctggagggtcattgaaactctcatgtgcagcctctggattcaccttcaataagtacgccatgaactgggtccgccaggctccaggaaagggtttggaatgggttgctcgcataagaagtaaatataataattatgcaacatattatgccgattcagtgaaagacaggttcaccatctccagagatgattcaaaaaacactgcctatctacaaatgaacaacttgaaaactgaggacactgccgtgtactactgtgtgagacatgggaacttcggtaatagctacatatcctactgggcttactggggccaagggactctggtcaccgtctcctcaggtggtggtggttctggcggcggcggctccggtggtggtggttctcagactgttgtgactcaggaaccttcactcaccgtatcacctggtggaacagtcacactcacttgtggctcctcgactggggctgttacatctggcaactacccaaactgggtccaacaaaaaccaggtcaggcaccccgtggtctaataggtgggactaagttcctcgcccccggtactcctgccagattctcaggctccctgcttggaggcaaggctgccctcaccctctcaggggtacagccagaggatgaggcagaatattactgtgttctatggtacagcaaccgctgggtgttcggtggaggaaccaaactgactgtccta

SEQ ID NO: 667 - protein, 111 aa, Artificial Sequence
  HD37-K L
DIQLTQSPASLAVSLGQRATISCKASQSVDYDGKSYLNWYQQIPGQPPKLLIYDASNLVSGIPPRFSGSGSGTDFTLNIHPVEKVDAATYHCQQSTEDPWTFGGGTKLEIK

SEQ ID NO: 668 - DNA, 333 bp, Artificial Sequence
  HD37-K L
gatatccagctgacccagtctccagcttctttggctgtgtctctagggcagagggccaccatctcctgcaaggccagccaaagtgttgattatgatggtaagagttatttgaactggtaccaacagattccaggacagccacccaaactcctcatctatgatgcatccaatctagtttctgggatcccacccaggtttagtggcagtgggtctgggacagacttcaccctcaacatccatcctgtggagaaggtggatgctgcaacctatcactgtcagcaaagtactgaggatccgtggacgttcggtggagggaccaagctcgagatcaaa

SEQ ID NO: 669 - protein, 15 aa, Artificial Sequence
  HD37-K LCDR1
KASQSVDYDGKSYLN

SEQ ID NO: 670 - protein, 7 aa, Artificial Sequence
  HD37-K LCDR2
DASNLVS

SEQ ID NO: 671 - protein, 9 aa, Artificial Sequence
  HD37-K LCDR3
QQSTEDPWT

SEQ ID NO: 672 - protein, 124 aa, Artificial Sequence; identical to SEQ ID NO: 476
  HD37-K H

SEQ ID NO: 673 - DNA, 372 bp, Artificial Sequence; identical to SEQ ID NO: 477
  HD37-K H

SEQ ID NO: 674 - protein, 5 aa, Artificial Sequence
  HD37-K HCDR1
SYWMN

SEQ ID NO: 675 - protein, 17 aa, Artificial Sequence
  HD37-K HCDR2
QIWPGDGDTNYNGKFKG

SEQ ID NO: 676 - protein, 15 aa, Artificial Sequence
  HD37-K HCDR3
RETTTVGRYYYAMDY

SEQ ID NO: 677 - protein, 504 aa, Artificial Sequence
  HD37-K LH x I2C HL
DIQLTQSPASLAVSLGQRATISCKASQSVDYDGKSYLNWYQQIPGQPPKLLIYDASNLVSGIPPRFSGSGSGTDFTLNIHPVEKVDAATYHCQQSTEDPWTFGGGTKLEIKGGGGSGGGGSGGGGSQVQLQQSGAELVRPGSSVKISCKASGYAFSSYWMNWVKQRPGQGLEWIGQIWPGDGDTNYNGKFKGKATLTADESSSTAYMQLSSLASEDSAVYFCARRETTTVGRYYYAMDYWGQGTTVTVSSGGGGSEVQLVESGGGLVQPGGSLKLSCAASGFTFNKYAMNWVRQAPGKGLEWVARIRSKYNNYATYYADSVKDRFTISRDDSKNTAYLQMNNLKTEDTAVYYCVRHGNFGNSYISYWAYWGQGTLVTVSSGGGGSGGGGSGGGGSQTVVTQEPSLTVSPGGTVTLTCGSSTGAVTSGNYPNWVQQKPGQAPRGLIGGTKFLAPGTPARFSGSLLGGKAALTLSGVQPEDEAEYYCVLWYSNRWVFGGGTKLTVL

SEQ ID NO: 678 - DNA, 1512 bp, Artificial Sequence
  HD37-K LH x I2C HL
gatatccagctgacccagtctccagcttctttggctgtgtctctagggcagagggccaccatctcctgcaaggccagccaaagtgttgattatgatggtaagagttatttgaactggtaccaacagattccaggacagccacccaaactcctcatctatgatgcatccaatctagtttctgggatcccacccaggtttagtggcagtgggtctgggacagacttcaccctcaacatccatcctgtggagaaggtggatgctgcaacctatcactgtcagcaaagtactgaggatccgtggacgttcggtggagggaccaagctcgagatcaaaggtggtggtggttctggcggcggcggctccggtggtggtggttctcaggtgcagctgcagcagtctggggctgagctggtgaggcctgggtcctcagtgaagatttcctgcaaggcttctggctatgcattcagtagctactggatgaactgggtgaagcagaggcctggacagggtcttgagtggattggacagatttggcctggagatggtgatactaactacaatggaaagttcaagggtaaagccactctgactgcagacgaatcctccagcacagcctacatgcaactcagcagcctagcatctgaggactctgcggtctatttctgtgcaagacgggagactacgacggtaggccgttattactatgctatggactactggggccaagggaccacggtcaccgtctcctccggaggtggtggatccgaggtgcagctggtcgagtctggaggaggattggtgcagcctggagggtcattgaaactctcatgtgcagcctctggattcaccttcaataagtacgccatgaactgggtccgccaggctccaggaaagggtttggaatgggttgctcgcataagaagtaaatataataattatgcaacatattatgccgattcagtgaaagacaggttcaccatctccagagatgattcaaaaaacactgcctatctacaaatgaacaacttgaaaactgaggacactgccgtgtactactgtgtgagacatgggaacttcggtaatagctacatatcctactgggcttactggggccaagggactctggtcaccgtctcctcaggtggtggtggttctggcggcggcggctccggtggtggtggttctcagactgttgtgactcaggaaccttcactcaccgtatcacctggtggaacagtcacactcacttgtggctcctcgactggggctgttacatctggcaactacccaaactgggtccaacaaaaaccaggtcaggcaccccgtggtctaataggtgggactaagttcctcgcccccggtactcctgccagattctcaggctccctgcttggaggcaaggctgccctcaccctctcaggggtacagccagaggatgaggcagaatattactgtgttctatggtacagcaaccgctgggtgttcggtggaggaaccaaactgactgtccta

SEQ ID NO: 679 - protein, 111 aa, Artificial Sequence
  HD37-R L
DIQLTQSPASLAVSLGQRATISCKASQSVDYDGRSYLNWYQQIPGQPPKLLIYDASNLVSGIPPRFSGSGSGTDFTLNIHPVEKVDAATYHCQQSTEDPWTFGGGTKLEIK

SEQ ID NO: 680 - DNA, 333 bp, Artificial Sequence
  HD37-R L
gatatccagctgacccagtctccagcttctttggctgtgtctctagggcagagggccaccatctcctgcaaggccagccaaagtgttgattatgatggtcgtagttatttgaactggtaccaacagattccaggacagccacccaaactcctcatctatgatgcatccaatctagtttctgggatcccacccaggtttagtggcagtgggtctgggacagacttcaccctcaacatccatcctgtggagaaggtggatgctgcaacctatcactgtcagcaaagtactgaggatccgtggacgttcggtggagggaccaagctcgagatcaaa

SEQ ID NO: 681 - protein, 15 aa, Artificial Sequence
  HD37-R LCDR1
KASQSVDYDGRSYLN

SEQ ID NO: 682 - protein, 7 aa, Artificial Sequence
  HD37-R LCDR2
DASNLVS

SEQ ID NO: 683 - protein, 9 aa, Artificial Sequence
  HD37-R LCDR3
QQSTEDPWT

SEQ ID NO: 684 - protein, 124 aa, Artificial Sequence; identical to SEQ ID NO: 476
  HD37-R H

SEQ ID NO: 685 - DNA, 372 bp, Artificial Sequence; identical to SEQ ID NO: 477
  HD37-R H

SEQ ID NO: 686 - protein, 5 aa, Artificial Sequence
  HD37-R HCDR1
SYWMN

SEQ ID NO: 687 - protein, 17 aa, Artificial Sequence
  HD37-R HCDR2
QIWPGDGDTNYNGKFKG

SEQ ID NO: 688 - protein, 15 aa, Artificial Sequence
  HD37-R HCDR3
RETTTVGRYYYAMDY

SEQ ID NO: 689 - protein, 504 aa, Artificial Sequence
  HD37-R LH x I2C HL
DIQLTQSPASLAVSLGQRATISCKASQSVDYDGRSYLNWYQQIPGQPPKLLIYDASNLVSGIPPRFSGSGSGTDFTLNIHPVEKVDAATYHCQQSTEDPWTFGGGTKLEIKGGGGSGGGGSGGGGSQVQLQQSGAELVRPGSSVKISCKASGYAFSSYWMNWVKQRPGQGLEWIGQIWPGDGDTNYNGKFKGKATLTADESSSTAYMQLSSLASEDSAVYFCARRETTTVGRYYYAMDYWGQGTTVTVSSGGGGSEVQLVESGGGLVQPGGSLKLSCAASGFTFNKYAMNWVRQAPGKGLEWVARIRSKYNNYATYYADSVKDRFTISRDDSKNTAYLQMNNLKTEDTAVYYCVRHGNFGNSYISYWAYWGQGTLVTVSSGGGGSGGGGSGGGGSQTVVTQEPSLTVSPGGTVTLTCGSSTGAVTSGNYPNWVQQKPGQAPRGLIGGTKFLAPGTPARFSGSLLGGKAALTLSGVQPEDEAEYYCVLWYSNRWVFGGGTKLTVL

SEQ ID NO: 690 - DNA, 1512 bp, Artificial Sequence
  HD37-R LH x I2C HL
gatatccagctgacccagtctccagcttctttggctgtgtctctagggcagagggccaccatctcctgcaaggccagccaaagtgttgattatgatggtcgtagttatttgaactggtaccaacagattccaggacagccacccaaactcctcatctatgatgcatccaatctagtttctgggatcccacccaggtttagtggcagtgggtctgggacagacttcaccctcaacatccatcctgtggagaaggtggatgctgcaacctatcactgtcagcaaagtactgaggatccgtggacgttcggtggagggaccaagctcgagatcaaaggtggtggtggttctggcggcggcggctccggtggtggtggttctcaggtgcagctgcagcagtctggggctgagctggtgaggcctgggtcctcagtgaagatttcctgcaaggcttctggctatgcattcagtagctactggatgaactgggtgaagcagaggcctggacagggtcttgagtggattggacagatttggcctggagatggtgatactaactacaatggaaagttcaagggtaaagccactctgactgcagacgaatcctccagcacagcctacatgcaactcagcagcctagcatctgaggactctgcggtctatttctgtgcaagacgggagactacgacggtaggccgttattactatgctatggactactggggccaagggaccacggtcaccgtctcctccggaggtggtggatccgaggtgcagctggtcgagtctggaggaggattggtgcagcctggagggtcattgaaactctcatgtgcagcctctggattcaccttcaataagtacgccatgaactgggtccgccaggctccaggaaagggtttggaatgggttgctcgcataagaagtaaatataataattatgcaacatattatgccgattcagtgaaagacaggttcaccatctccagagatgattcaaaaaacactgcctatctacaaatgaacaacttgaaaactgaggacactgccgtgtactactgtgtgagacatgggaacttcggtaatagctacatatcctactgggcttactggggccaagggactctggtcaccgtctcctcaggtggtggtggttctggcggcggcggctccggtggtggtggttctcagactgttgtgactcaggaaccttcactcaccgtatcacctggtggaacagtcacactcacttgtggctcctcgactggggctgttacatctggcaactacccaaactgggtccaacaaaaaccaggtcaggcaccccgtggtctaataggtgggactaagttcctcgcccccggtactcctgccagattctcaggctccctgcttggaggcaaggctgccctcaccctctcaggggtacagccagaggatgaggcagaatattactgtgttctatggtacagcaaccgctgggtgttcggtggaggaaccaaactgactgtccta

SEQ ID NO: 691 - protein, 111 aa, Artificial Sequence
  HD37-H L
DIQLTQSPASLAVSLGQRATISCKASQSVDYDGHSYLNWYQQIPGQPPKLLIYDASNLVSGIPPRFSGSGSGTDFTLNIHPVEKVDAATYHCQQSTEDPWTFGGGTKLEIK

SEQ ID NO: 692 - DNA, 333 bp, Artificial Sequence
  HD37-H L
gatatccagctgacccagtctccagcttctttggctgtgtctctagggcagagggccaccatctcctgcaaggccagccaaagtgttgattatgatggtcacagttatttgaactggtaccaacagattccaggacagccacccaaactcctcatctatgatgcatccaatctagtttctgggatcccacccaggtttagtggcagtgggtctgggacagacttcaccctcaacatccatcctgtggagaaggtggatgctgcaacctatcactgtcagcaaagtactgaggatccgtggacgttcggtggagggaccaagctcgagatcaaa

SEQ ID NO: 693 - protein, 15 aa, Artificial Sequence
  HD37-H LCDR1
KASQSVDYDGHSYLN

SEQ ID NO: 694 - protein, 7 aa, Artificial Sequence
  HD37-H LCDR2
DASNLVS

SEQ ID NO: 695 - protein, 9 aa, Artificial Sequence
  HD37-H LCDR3
QQSTEDPWT

SEQ ID NO: 696 - protein, 124 aa, Artificial Sequence; identical to SEQ ID NO: 476
  HD37-H H

SEQ ID NO: 697 - DNA, 372 bp, Artificial Sequence; identical to SEQ ID NO: 477
  HD37-H H

SEQ ID NO: 698 - protein, 5 aa, Artificial Sequence
  HD37-H HCDR1
SYWMN

SEQ ID NO: 699 - protein, 17 aa, Artificial Sequence
  HD37-H HCDR2
QIWPGDGDTNYNGKFKG

SEQ ID NO: 700 - protein, 15 aa, Artificial Sequence
  HD37-H HCDR3
RETTTVGRYYYAMDY

SEQ ID NO: 701 - protein, 504 aa, Artificial Sequence
  HD37-H LH x I2C HL
DIQLTQSPASLAVSLGQRATISCKASQSVDYDGHSYLNWYQQIPGQPPKLLIYDASNLVSGIPPRFSGSGSGTDFTLNIHPVEKVDAATYHCQQSTEDPWTFGGGTKLEIKGGGGSGGGGSGGGGSQVQLQQSGAELVRPGSSVKISCKASGYAFSSYWMNWVKQRPGQGLEWIGQIWPGDGDTNYNGKFKGKATLTADESSSTAYMQLSSLASEDSAVYFCARRETTTVGRYYYAMDYWGQGTTVTVSSGGGGSEVQLVESGGGLVQPGGSLKLSCAASGFTFNKYAMNWVRQAPGKGLEWVARIRSKYNNYATYYADSVKDRFTISRDDSKNTAYLQMNNLKTEDTAVYYCVRHGNFGNSYISYWAYWGQGTLVTVSSGGGGSGGGGSGGGGSQTVVTQEPSLTVSPGGTVTLTCGSSTGAVTSGNYPNWVQQKPGQAPRGLIGGTKFLAPGTPARFSGSLLGGKAALTLSGVQPEDEAEYYCVLWYSNRWVFGGGTKLTVL

SEQ ID NO: 702 - DNA, 1512 bp, Artificial Sequence
  HD37-H LH x I2C HL
gatatccagctgacccagtctccagcttctttggctgtgtctctagggcagagggccaccatctcctgcaaggccagccaaagtgttgattatgatggtcacagttatttgaactggtaccaacagattccaggacagccacccaaactcctcatctatgatgcatccaatctagtttctgggatcccacccaggtttagtggcagtgggtctgggacagacttcaccctcaacatccatcctgtggagaaggtggatgctgcaacctatcactgtcagcaaagtactgaggatccgtggacgttcggtggagggaccaagctcgagatcaaaggtggtggtggttctggcggcggcggctccggtggtggtggttctcaggtgcagctgcagcagtctggggctgagctggtgaggcctgggtcctcagtgaagatttcctgcaaggcttctggctatgcattcagtagctactggatgaactgggtgaagcagaggcctggacagggtcttgagtggattggacagatttggcctggagatggtgatactaactacaatggaaagttcaagggtaaagccactctgactgcagacgaatcctccagcacagcctacatgcaactcagcagcctagcatctgaggactctgcggtctatttctgtgcaagacgggagactacgacggtaggccgttattactatgctatggactactggggccaagggaccacggtcaccgtctcctccggaggtggtggatccgaggtgcagctggtcgagtctggaggaggattggtgcagcctggagggtcattgaaactctcatgtgcagcctctggattcaccttcaataagtacgccatgaactgggtccgccaggctccaggaaagggtttggaatgggttgctcgcataagaagtaaatataataattatgcaacatattatgccgattcagtgaaagacaggttcaccatctccagagatgattcaaaaaacactgcctatctacaaatgaacaacttgaaaactgaggacactgccgtgtactactgtgtgagacatgggaacttcggtaatagctacatatcctactgggcttactggggccaagggactctggtcaccgtctcctcaggtggtggtggttctggcggcggcggctccggtggtggtggttctcagactgttgtgactcaggaaccttcactcaccgtatcacctggtggaacagtcacactcacttgtggctcctcgactggggctgttacatctggcaactacccaaactgggtccaacaaaaaccaggtcaggcaccccgtggtctaataggtgggactaagttcctcgcccccggtactcctgccagattctcaggctccctgcttggaggcaaggctgccctcaccctctcaggggtacagccagaggatgaggcagaatattactgtgttctatggtacagcaaccgctgggtgttcggtggaggaaccaaactgactgtccta

SEQ ID NO: 703 - protein, 111 aa, Artificial Sequence
  HD37-Y L
DIQLTQSPASLAVSLGQRATISCKASQSVDYDGYSYLNWYQQIPGQPPKLLIYDASNLVSGIPPRFSGSGSGTDFTLNIHPVEKVDAATYHCQQSTEDPWTFGGGTKLEIK

SEQ ID NO: 704 - DNA, 333 bp, Artificial Sequence
  HD37-Y L
gatatccagctgacccagtctccagcttctttggctgtgtctctagggcagagggccaccatctcctgcaaggccagccaaagtgttgattatgatggttacagttatttgaactggtaccaacagattccaggacagccacccaaactcctcatctatgatgcatccaatctagtttctgggatcccacccaggtttagtggcagtgggtctgggacagacttcaccctcaacatccatcctgtggagaaggtggatgctgcaacctatcactgtcagcaaagtactgaggatccgtggacgttcggtggagggaccaagctcgagatcaaa

SEQ ID NO: 705 - protein, 15 aa, Artificial Sequence
  HD37-Y LCDR1
KASQSVDYDGYSYLN

SEQ ID NO: 706 - protein, 7 aa, Artificial Sequence
  HD37-Y LCDR2
DASNLVS

SEQ ID NO: 707 - protein, 9 aa, Artificial Sequence
  HD37-Y LCDR3
QQSTEDPWT

SEQ ID NO: 708 - protein, 124 aa, Artificial Sequence; identical to SEQ ID NO: 476
  HD37-Y H

SEQ ID NO: 709 - DNA, 372 bp, Artificial Sequence; identical to SEQ ID NO: 477
  HD37-Y H

SEQ ID NO: 710 - protein, 5 aa, Artificial Sequence
  HD37-Y HCDR1
SYWMN

SEQ ID NO: 711 - protein, 17 aa, Artificial Sequence
  HD37-Y HCDR2
QIWPGDGDTNYNGKFKG

SEQ ID NO: 712 - protein, 15 aa, Artificial Sequence
  HD37-Y HCDR3
RETTTVGRYYYAMDY

SEQ ID NO: 713 - protein, 504 aa, Artificial Sequence
  HD37-Y LH x I2C HL
DIQLTQSPASLAVSLGQRATISCKASQSVDYDGYSYLNWYQQIPGQPPKLLIYDASNLVSGIPPRFSGSGSGTDFTLNIHPVEKVDAATYHCQQSTEDPWTFGGGTKLEIKGGGGSGGGGSGGGGSQVQLQQSGAELVRPGSSVKISCKASGYAFSSYWMNWVKQRPGQGLEWIGQIWPGDGDTNYNGKFKGKATLTADESSSTAYMQLSSLASEDSAVYFCARRETTTVGRYYYAMDYWGQGTTVTVSSGGGGSEVQLVESGGGLVQPGGSLKLSCAASGFTFNKYAMNWVRQAPGKGLEWVARIRSKYNNYATYYADSVKDRFTISRDDSKNTAYLQMNNLKTEDTAVYYCVRHGNFGNSYISYWAYWGQGTLVTVSSGGGGSGGGGSGGGGSQTVVTQEPSLTVSPGGTVTLTCGSSTGAVTSGNYPNWVQQKPGQAPRGLIGGTKFLAPGTPARFSGSLLGGKAALTLSGVQPEDEAEYYCVLWYSNRWVFGGGTKLTVL

SEQ ID NO: 714 - DNA, 1512 bp, Artificial Sequence
  HD37-Y LH x I2C HL
gatatccagctgacccagtctccagcttctttggctgtgtctctagggcagagggccaccatctcctgcaaggccagccaaagtgttgattatgatggttacagttatttgaactggtaccaacagattccaggacagccacccaaactcctcatctatgatgcatccaatctagtttctgggatcccacccaggtttagtggcagtgggtctgggacagacttcaccctcaacatccatcctgtggagaaggtggatgctgcaacctatcactgtcagcaaagtactgaggatccgtggacgttcggtggagggaccaagctcgagatcaaaggtggtggtggttctggcggcggcggctccggtggtggtggttctcaggtgcagctgcagcagtctggggctgagctggtgaggcctgggtcctcagtgaagatttcctgcaaggcttctggctatgcattcagtagctactggatgaactgggtgaagcagaggcctggacagggtcttgagtggattggacagatttggcctggagatggtgatactaactacaatggaaagttcaagggtaaagccactctgactgcagacgaatcctccagcacagcctacatgcaactcagcagcctagcatctgaggactctgcggtctatttctgtgcaagacgggagactacgacggtaggccgttattactatgctatggactactggggccaagggaccacggtcaccgtctcctccggaggtggtggatccgaggtgcagctggtcgagtctggaggaggattggtgcagcctggagggtcattgaaactctcatgtgcagcctctggattcaccttcaataagtacgccatgaactgggtccgccaggctccaggaaagggtttggaatgggttgctcgcataagaagtaaatataataattatgcaacatattatgccgattcagtgaaagacaggttcaccatctccagagatgattcaaaaaacactgcctatctacaaatgaacaacttgaaaactgaggacactgccgtgtactactgtgtgagacatgggaacttcggtaatagctacatatcctactgggcttactggggccaagggactctggtcaccgtctcctcaggtggtggtggttctggcggcggcggctccggtggtggtggttctcagactgttgtgactcaggaaccttcactcaccgtatcacctggtggaacagtcacactcacttgtggctcctcgactggggctgttacatctggcaactacccaaactgggtccaacaaaaaccaggtcaggcaccccgtggtctaataggtgggactaagttcctcgcccccggtactcctgccagattctcaggctccctgcttggaggcaaggctgccctcaccctctcaggggtacagccagaggatgaggcagaatattactgtgttctatggtacagcaaccgctgggtgttcggtggaggaaccaaactgactgtccta

SEQ ID NO: 715 - protein, 111 aa, Artificial Sequence
  HD37-P L
DIQLTQSPASLAVSLGQRATISCKASQSVDYDGPSYLNWYQQIPGQPPKLLIYDASNLVSGIPPRFSGSGSGTDFTLNIHPVEKVDAATYHCQQSTEDPWTFGGGTKLEIK

SEQ ID NO: 716 - DNA, 333 bp, Artificial Sequence
  HD37-P L
gatatccagctgacccagtctccagcttctttggctgtgtctctagggcagagggccaccatctcctgcaaggccagccaaagtgttgattatgatggtccaagttatttgaactggtaccaacagattccaggacagccacccaaactcctcatctatgatgcatccaatctagtttctgggatcccacccaggtttagtggcagtgggtctgggacagacttcaccctcaacatccatcctgtggagaaggtggatgctgcaacctatcactgtcagcaaagtactgaggatccgtggacgttcggtggagggaccaagctcgagatcaaa

SEQ ID NO: 717 - protein, 15 aa, Artificial Sequence
  HD37-P LCDR1
KASQSVDYDGPSYLN

SEQ ID NO: 718 - protein, 7 aa, Artificial Sequence
  HD37-P LCDR2
DASNLVS

SEQ ID NO: 719 - protein, 9 aa, Artificial Sequence
  HD37-P LCDR3
QQSTEDPWT

SEQ ID NO: 720 - protein, 124 aa, Artificial Sequence; identical to SEQ ID NO: 476
  HD37-P H

SEQ ID NO: 721 - DNA, 372 bp, Artificial Sequence; identical to SEQ ID NO: 477
  HD37-P H

SEQ ID NO: 722 - protein, 5 aa, Artificial Sequence
  HD37-P HCDR1
SYWMN

SEQ ID NO: 723 - protein, 17 aa, Artificial Sequence
  HD37-P HCDR2
QIWPGDGDTNYNGKFKG

SEQ ID NO: 724 - protein, 15 aa, Artificial Sequence
  HD37-P HCDR3
RETTTVGRYYYAMDY

SEQ ID NO: 725 - protein, 504 aa, Artificial Sequence
  HD37-P LH x I2C HL
DIQLTQSPASLAVSLGQRATISCKASQSVDYDGPSYLNWYQQIPGQPPKLLIYDASNLVSGIPPRFSGSGSGTDFTLNIHPVEKVDAATYHCQQSTEDPWTFGGGTKLEIKGGGGSGGGGSGGGGSQVQLQQSGAELVRPGSSVKISCKASGYAFSSYWMNWVKQRPGQGLEWIGQIWPGDGDTNYNGKFKGKATLTADESSSTAYMQLSSLASEDSAVYFCARRETTTVGRYYYAMDYWGQGTTVTVSSGGGGSEVQLVESGGGLVQPGGSLKLSCAASGFTFNKYAMNWVRQAPGKGLEWVARIRSKYNNYATYYADSVKDRFTISRDDSKNTAYLQMNNLKTEDTAVYYCVRHGNFGNSYISYWAYWGQGTLVTVSSGGGGSGGGGSGGGGSQTVVTQEPSLTVSPGGTVTLTCGSSTGAVTSGNYPNWVQQKPGQAPRGLIGGTKFLAPGTPARFSGSLLGGKAALTLSGVQPEDEAEYYCVLWYSNRWVFGGGTKLTVL

SEQ ID NO: 726 - DNA, 1512 bp, Artificial Sequence
  HD37-P LH x I2C HL
gatatccagctgacccagtctccagcttctttggctgtgtctctagggcagagggccaccatctcctgcaaggccagccaaagtgttgattatgatggtccaagttatttgaactggtaccaacagattccaggacagccacccaaactcctcatctatgatgcatccaatctagtttctgggatcccacccaggtttagtggcagtgggtctgggacagacttcaccctcaacatccatcctgtggagaaggtggatgctgcaacctatcactgtcagcaaagtactgaggatccgtggacgttcggtggagggaccaagctcgagatcaaaggtggtggtggttctggcggcggcggctccggtggtggtggttctcaggtgcagctgcagcagtctggggctgagctggtgaggcctgggtcctcagtgaagatttcctgcaaggcttctggctatgcattcagtagctactggatgaactgggtgaagcagaggcctggacagggtcttgagtggattggacagatttggcctggagatggtgatactaactacaatggaaagttcaagggtaaagccactctgactgcagacgaatcctccagcacagcctacatgcaactcagcagcctagcatctgaggactctgcggtctatttctgtgcaagacgggagactacgacggtaggccgttattactatgctatggactactggggccaagggaccacggtcaccgtctcctccggaggtggtggatccgaggtgcagctggtcgagtctggaggaggattggtgcagcctggagggtcattgaaactctcatgtgcagcctctggattcaccttcaataagtacgccatgaactgggtccgccaggctccaggaaagggtttggaatgggttgctcgcataagaagtaaatataataattatgcaacatattatgccgattcagtgaaagacaggttcaccatctccagagatgattcaaaaaacactgcctatctacaaatgaacaacttgaaaactgaggacactgccgtgtactactgtgtgagacatgggaacttcggtaatagctacatatcctactgggcttactggggccaagggactctggtcaccgtctcctcaggtggtggtggttctggcggcggcggctccggtggtggtggttctcagactgttgtgactcaggaaccttcactcaccgtatcacctggtggaacagtcacactcacttgtggctcctcgactggggctgttacatctggcaactacccaaactgggtccaacaaaaaccaggtcaggcaccccgtggtctaataggtgggactaagttcctcgcccccggtactcctgccagattctcaggctccctgcttggaggcaaggctgccctcaccctctcaggggtacagccagaggatgaggcagaatattactgtgttctatggtacagcaaccgctgggtgttcggtggaggaaccaaactgactgtccta

SEQ ID NO: 727 - protein, 111 aa, Artificial Sequence
  HD37-F L
DIQLTQSPASLAVSLGQRATISCKASQSVDYDGFSYLNWYQQIPGQPPKLLIYDASNLVSGIPPRFSGSGSGTDFTLNIHPVEKVDAATYHCQQSTEDPWTFGGGTKLEIK

SEQ ID NO: 728 - DNA, 333 bp, Artificial Sequence
  HD37-F L
gatatccagctgacccagtctccagcttctttggctgtgtctctagggcagagggccaccatctcctgcaaggccagccaaagtgttgattatgatggtttcagttatttgaactggtaccaacagattccaggacagccacccaaactcctcatctatgatgcatccaatctagtttctgggatcccacccaggtttagtggcagtgggtctgggacagacttcaccctcaacatccatcctgtggagaaggtggatgctgcaacctatcactgtcagcaaagtactgaggatccgtggacgttcggtggagggaccaagctcgagatcaaa

SEQ ID NO: 729 - protein, 15 aa, Artificial Sequence
  HD37-F LCDR1
KASQSVDYDGFSYLN

SEQ ID NO: 730 - protein, 7 aa, Artificial Sequence
  HD37-F LCDR2
DASNLVS

SEQ ID NO: 731 - protein, 9 aa, Artificial Sequence
  HD37-F LCDR3
QQSTEDPWT

SEQ ID NO: 732 - protein, 124 aa, Artificial Sequence; identical to SEQ ID NO: 476
  HD37-F H

SEQ ID NO: 733 - DNA, 372 bp, Artificial Sequence; identical to SEQ ID NO: 477
  HD37-F H

SEQ ID NO: 734 - protein, 5 aa, Artificial Sequence
  HD37-F HCDR1
SYWMN

SEQ ID NO: 735 - protein, 17 aa, Artificial Sequence
  HD37-F HCDR2
QIWPGDGDTNYNGKFKG

SEQ ID NO: 736 - protein, 15 aa, Artificial Sequence
  HD37-F HCDR3
RETTTVGRYYYAMDY

SEQ ID NO: 737 - protein, 504 aa, Artificial Sequence
  HD37-F LH x I2C HL
DIQLTQSPASLAVSLGQRATISCKASQSVDYDGFSYLNWYQQIPGQPPKLLIYDASNLVSGIPPRFSGSGSGTDFTLNIHPVEKVDAATYHCQQSTEDPWTFGGGTKLEIKGGGGSGGGGSGGGGSQVQLQQSGAELVRPGSSVKISCKASGYAFSSYWMNWVKQRPGQGLEWIGQIWPGDGDTNYNGKFKGKATLTADESSSTAYMQLSSLASEDSAVYFCARRETTTVGRYYYAMDYWGQGTTVTVSSGGGGSEVQLVESGGGLVQPGGSLKLSCAASGFTFNKYAMNWVRQAPGKGLEWVARIRSKYNNYATYYADSVKDRFTISRDDSKNTAYLQMNNLKTEDTAVYYCVRHGNFGNSYISYWAYWGQGTLVTVSSGGGGSGGGGSGGGGSQTVVTQEPSLTVSPGGTVTLTCGSSTGAVTSGNYPNWVQQKPGQAPRGLIGGTKFLAPGTPARFSGSLLGGKAALTLSGVQPEDEAEYYCVLWYSNRWVFGGGTKLTVL

SEQ ID NO: 738 - DNA, 1512 bp, Artificial Sequence
  HD37-F LH x I2C HL
gatatccagctgacccagtctccagcttctttggctgtgtctctagggcagagggccaccatctcctgcaaggccagccaaagtgttgattatgatggtttcagttatttgaactggtaccaacagattccaggacagccacccaaactcctcatctatgatgcatccaatctagtttctgggatcccacccaggtttagtggcagtgggtctgggacagacttcaccctcaacatccatcctgtggagaaggtggatgctgcaacctatcactgtcagcaaagtactgaggatccgtggacgttcggtggagggaccaagctcgagatcaaaggtggtggtggttctggcggcggcggctccggtggtggtggttctcaggtgcagctgcagcagtctggggctgagctggtgaggcctgggtcctcagtgaagatttcctgcaaggcttctggctatgcattcagtagctactggatgaactgggtgaagcagaggcctggacagggtcttgagtggattggacagatttggcctggagatggtgatactaactacaatggaaagttcaagggtaaagccactctgactgcagacgaatcctccagcacagcctacatgcaactcagcagcctagcatctgaggactctgcggtctatttctgtgcaagacgggagactacgacggtaggccgttattactatgctatggactactggggccaagggaccacggtcaccgtctcctccggaggtggtggatccgaggtgcagctggtcgagtctggaggaggattggtgcagcctggagggtcattgaaactctcatgtgcagcctctggattcaccttcaataagtacgccatgaactgggtccgccaggctccaggaaagggtttggaatgggttgctcgcataagaagtaaatataataattatgcaacatattatgccgattcagtgaaagacaggttcaccatctccagagatgattcaaaaaacactgcctatctacaaatgaacaacttgaaaactgaggacactgccgtgtactactgtgtgagacatgggaacttcggtaatagctacatatcctactgggcttactggggccaagggactctggtcaccgtctcctcaggtggtggtggttctggcggcggcggctccggtggtggtggttctcagactgttgtgactcaggaaccttcactcaccgtatcacctggtggaacagtcacactcacttgtggctcctcgactggggctgttacatctggcaactacccaaactgggtccaacaaaaaccaggtcaggcaccccgtggtctaataggtgggactaagttcctcgcccccggtactcctgccagattctcaggctccctgcttggaggcaaggctgccctcaccctctcaggggtacagccagaggatgaggcagaatattactgtgttctatggtacagcaaccgctgggtgttcggtggaggaaccaaactgactgtccta

SEQ ID NO: 739 - protein, 111 aa, Artificial Sequence
  HD37-W L
DIQLTQSPASLAVSLGQRATISCKASQSVDYDGWSYLNWYQQIPGQPPKLLIYDASNLVSGIPPRFSGSGSGTDFTLNIHPVEKVDAATYHCQQSTEDPWTFGGGTKLEIK

SEQ ID NO: 740 - DNA, 333 bp, Artificial Sequence
  HD37-W L
gatatccagctgacccagtctccagcttctttggctgtgtctctagggcagagggccaccatctcctgcaaggccagccaaagtgttgattatgatggttggagttatttgaactggtaccaacagattccaggacagccacccaaactcctcatctatgatgcatccaatctagtttctgggatcccacccaggtttagtggcagtgggtctgggacagacttcaccctcaacatccatcctgtggagaaggtggatgctgcaacctatcactgtcagcaaagtactgaggatccgtggacgttcggtggagggaccaagctcgagatcaaa

SEQ ID NO: 741 - protein, 15 aa, Artificial Sequence
  HD37-W LCDR1
KASQSVDYDGWSYLN

SEQ ID NO: 742 - protein, 7 aa, Artificial Sequence
  HD37-W LCDR2
DASNLVS

SEQ ID NO: 743 - protein, 9 aa, Artificial Sequence
  HD37-W LCDR3
QQSTEDPWT

SEQ ID NO: 744 - protein, 124 aa, Artificial Sequence; identical to SEQ ID NO: 476
  HD37-W H

SEQ ID NO: 745 - DNA, 372 bp, Artificial Sequence; identical to SEQ ID NO: 477
  HD37-W H

SEQ ID NO: 746 - protein, 5 aa, Artificial Sequence
  HD37-W HCDR1
SYWMN

SEQ ID NO: 747 - protein, 17 aa, Artificial Sequence
  HD37-W HCDR2
QIWPGDGDTNYNGKFKG

SEQ ID NO: 748 - protein, 15 aa, Artificial Sequence
  HD37-W HCDR3
RETTTVGRYYYAMDY

SEQ ID NO: 749 - protein, 504 aa, Artificial Sequence
  HD37-W LH x I2C HL
DIQLTQSPASLAVSLGQRATISCKASQSVDYDGWSYLNWYQQIPGQPPKLLIYDASNLVSGIPPRFSGSGSGTDFTLNIHPVEKVDAATYHCQQSTEDPWTFGGGTKLEIKGGGGSGGGGSGGGGSQVQLQQSGAELVRPGSSVKISCKASGYAFSSYWMNWVKQRPGQGLEWIGQIWPGDGDTNYNGKFKGKATLTADESSSTAYMQLSSLASEDSAVYFCARRETTTVGRYYYAMDYWGQGTTVTVSSGGGGSEVQLVESGGGLVQPGGSLKLSCAASGFTFNKYAMNWVRQAPGKGLEWVARIRSKYNNYATYYADSVKDRFTISRDDSKNTAYLQMNNLKTEDTAVYYCVRHGNFGNSYISYWAYWGQGTLVTVSSGGGGSGGGGSGGGGSQTVVTQEPSLTVSPGGTVTLTCGSSTGAVTSGNYPNWVQQKPGQAPRGLIGGTKFLAPGTPARFSGSLLGGKAALTLSGVQPEDEAEYYCVLWYSNRWVFGGGTKLTVL

SEQ ID NO: 750 - DNA, 1512 bp, Artificial Sequence
  HD37-W LH x I2C HL
gatatccagctgacccagtctccagcttctttggctgtgtctctagggcagagggccaccatctcctgcaaggccagccaaagtgttgattatgatggttggagttatttgaactggtaccaacagattccaggacagccacccaaactcctcatctatgatgcatccaatctagtttctgggatcccacccaggtttagtggcagtgggtctgggacagacttcaccctcaacatccatcctgtggagaaggtggatgctgcaacctatcactgtcagcaaagtactgaggatccgtggacgttcggtggagggaccaagctcgagatcaaaggtggtggtggttctggcggcggcggctccggtggtggtggttctcaggtgcagctgcagcagtctggggctgagctggtgaggcctgggtcctcagtgaagatttcctgcaaggcttctggctatgcattcagtagctactggatgaactgggtgaagcagaggcctggacagggtcttgagtggattggacagatttggcctggagatggtgatactaactacaatggaaagttcaagggtaaagccactctgactgcagacgaatcctccagcacagcctacatgcaactcagcagcctagcatctgaggactctgcggtctatttctgtgcaagacgggagactacgacggtaggccgttattactatgctatggactactggggccaagggaccacggtcaccgtctcctccggaggtggtggatccgaggtgcagctggtcgagtctggaggaggattggtgcagcctggagggtcattgaaactctcatgtgcagcctctggattcaccttcaataagtacgccatgaactgggtccgccaggctccaggaaagggtttggaatgggttgctcgcataagaagtaaatataataattatgcaacatattatgccgattcagtgaaagacaggttcaccatctccagagatgattcaaaaaacactgcctatctacaaatgaacaacttgaaaactgaggacactgccgtgtactactgtgtgagacatgggaacttcggtaatagctacatatcctactgggcttactggggccaagggactctggtcaccgtctcctcaggtggtggtggttctggcggcggcggctccggtggtggtggttctcagactgttgtgactcaggaaccttcactcaccgtatcacctggtggaacagtcacactcacttgtggctcctcgactggggctgttacatctggcaactacccaaactgggtccaacaaaaaccaggtcaggcaccccgtggtctaataggtgggactaagttcctcgcccccggtactcctgccagattctcaggctccctgcttggaggcaaggctgccctcaccctctcaggggtacagccagaggatgaggcagaatattactgtgttctatggtacagcaaccgctgggtgttcggtggaggaaccaaactgactgtccta

SEQ ID NO: 751 - protein, 111 aa, Artificial Sequence
  HD37-M L
DIQLTQSPASLAVSLGQRATISCKASQSVDYDGMSYLNWYQQIPGQPPKLLIYDASNLVSGIPPRFSGSGSGTDFTLNIHPVEKVDAATYHCQQSTEDPWTFGGGTKLEIK

SEQ ID NO: 752 - DNA, 333 bp, Artificial Sequence
  HD37-M L
gatatccagctgacccagtctccagcttctttggctgtgtctctagggcagagggccaccatctcctgcaaggccagccaaagtgttgattatgatggtatgagttatttgaactggtaccaacagattccaggacagccacccaaactcctcatctatgatgcatccaatctagtttctgggatcccacccaggtttagtggcagtgggtctgggacagacttcaccctcaacatccatcctgtggagaaggtggatgctgcaacctatcactgtcagcaaagtactgaggatccgtggacgttcggtggagggaccaagctcgagatcaaa

SEQ ID NO: 753 - protein, 15 aa, Artificial Sequence
  HD37-M LCDR1
KASQSVDYDGMSYLN

SEQ ID NO: 754 - protein, 7 aa, Artificial Sequence
  HD37-M LCDR2
DASNLVS

SEQ ID NO: 755 - protein, 9 aa, Artificial Sequence
  HD37-M LCDR3
QQSTEDPWT

SEQ ID NO: 756 - protein, 124 aa, Artificial Sequence; identical to SEQ ID NO: 476
  HD37-M H

SEQ ID NO: 757 - DNA, 372 bp, Artificial Sequence; identical to SEQ ID NO: 477
  HD37-M H

SEQ ID NO: 758 - protein, 5 aa, Artificial Sequence
  HD37-M HCDR1
SYWMN

SEQ ID NO: 759 - protein, 17 aa, Artificial Sequence
  HD37-M HCDR2
QIWPGDGDTNYNGKFKG

SEQ ID NO: 760 - protein, 15 aa, Artificial Sequence
  HD37-M HCDR3
RETTTVGRYYYAMDY

SEQ ID NO: 761 - protein, 504 aa, Artificial Sequence
  HD37-M LH x I2C HL
DIQLTQSPASLAVSLGQRATISCKASQSVDYDGMSYLNWYQQIPGQPPKLLIYDASNLVSGIPPRFSGSGSGTDFTLNIHPVEKVDAATYHCQQSTEDPWTFGGGTKLEIKGGGGSGGGGSGGGGSQVQLQQSGAELVRPGSSVKISCKASGYAFSSYWMNWVKQRPGQGLEWIGQIWPGDGDTNYNGKFKGKATLTADESSSTAYMQLSSLASEDSAVYFCARRETTTVGRYYYAMDYWGQGTTVTVSSGGGGSEVQLVESGGGLVQPGGSLKLSCAASGFTFNKYAMNWVRQAPGKGLEWVARIRSKYNNYATYYADSVKDRFTISRDDSKNTAYLQMNNLKTEDTAVYYCVRHGNFGNSYISYWAYWGQGTLVTVSSGGGGSGGGGSGGGGSQTVVTQEPSLTVSPGGTVTLTCGSSTGAVTSGNYPNWVQQKPGQAPRGLIGGTKFLAPGTPARFSGSLLGGKAALTLSGVQPEDEAEYYCVLWYSNRWVFGGGTKLTVL

SEQ ID NO: 762 - DNA, 1512 bp, Artificial Sequence
  HD37-M LH x I2C HL
gatatccagctgacccagtctccagcttctttggctgtgtctctagggcagagggccaccatctcctgcaaggccagccaaagtgttgattatgatggtatgagttatttgaactggtaccaacagattccaggacagccacccaaactcctcatctatgatgcatccaatctagtttctgggatcccacccaggtttagtggcagtgggtctgggacagacttcaccctcaacatccatcctgtggagaaggtggatgctgcaacctatcactgtcagcaaagtactgaggatccgtggacgttcggtggagggaccaagctcgagatcaaaggtggtggtggttctggcggcggcggctccggtggtggtggttctcaggtgcagctgcagcagtctggggctgagctggtgaggcctgggtcctcagtgaagatttcctgcaaggcttctggctatgcattcagtagctactggatgaactgggtgaagcagaggcctggacagggtcttgagtggattggacagatttggcctggagatggtgatactaactacaatggaaagttcaagggtaaagccactctgactgcagacgaatcctccagcacagcctacatgcaactcagcagcctagcatctgaggactctgcggtctatttctgtgcaagacgggagactacgacggtaggccgttattactatgctatggactactggggccaagggaccacggtcaccgtctcctccggaggtggtggatccgaggtgcagctggtcgagtctggaggaggattggtgcagcctggagggtcattgaaactctcatgtgcagcctctggattcaccttcaataagtacgccatgaactgggtccgccaggctccaggaaagggtttggaatgggttgctcgcataagaagtaaatataataattatgcaacatattatgccgattcagtgaaagacaggttcaccatctccagagatgattcaaaaaacactgcctatctacaaatgaacaacttgaaaactgaggacactgccgtgtactactgtgtgagacatgggaacttcggtaatagctacatatcctactgggcttactggggccaagggactctggtcaccgtctcctcaggtggtggtggttctggcggcggcggctccggtggtggtggttctcagactgttgtgactcaggaaccttcactcaccgtatcacctggtggaacagtcacactcacttgtggctcctcgactggggctgttacatctggcaactacccaaactgggtccaacaaaaaccaggtcaggcaccccgtggtctaataggtgggactaagttcctcgcccccggtactcctgccagattctcaggctccctgcttggaggcaaggctgccctcaccctctcaggggtacagccagaggatgaggcagaatattactgtgttctatggtacagcaaccgctgggtgttcggtggaggaaccaaactgactgtccta

SEQ ID NO: 763 - DNA, 72 bp, Artificial Sequence
  37VH-aXho1
cagctgctcgagtctggggctgagstgrwgargcctgggkcctcagtgaagrtttcctgcaaggcttctggc

SEQ ID NO: 764 - DNA, 81 bp, Artificial Sequence
  37VH-b
ccactcaagaccctgtccagggssctgcytcacccagttcatccagtagctagwgaatgyatagccagaagccttgcagga

SEQ ID NO: 765 - DNA, 72 bp, Artificial Sequence
  37VH-c
ggacagggtcttgagtggatkggacagatttggcctggagatggtgatactaactacaatggaaagttcaag

SEQ ID NO: 766 - DNA, 82 bp, Artificial Sequence
  37VH-d
caggctgctgagttscatgtagrctgtgctggtggatkygtcassagtcakagtgrctytacccttgaactttccattgtag

SEQ ID NO: 767 - DNA, 71 bp, Artificial Sequence
  37VH-e
catgsaactcagcagcctgssatctgaggacactgcggtctattwctgtgcaagacgggagactacgacgg

SEQ ID NO: 768 - DNA, 81 bp, Artificial Sequence
  37VH-fBstE2
ggagacggtgaccgtggtcccttggccccagtagtccatagcatagtaataacggcctaccgtcgtagtctcccgtcttgc

SEQ ID NO: 769 - DNA, 84 bp, Artificial Sequence
  37VL-A-SacI
cagctggagctccagatgacccagtctccakcttctttgkctgygtctstagggsasagagycaccatcwcctgcaaggccagc

SEQ ID NO: 770 - DNA, 69 bp, Artificial Sequence
  37VL-B
  misc_feature (26)..(27): n is a, c, g, or t
ctgttggtaccagttcaaataastsnnaccatcataatcaacactttggctggccttgcaggtgatggt

SEQ ID NO: 771 - DNA, 72 bp, Artificial Sequence
  37VL-C
ttgaactggtaccaacagawaccaggamagscacccaaactcctcatctatgatgcatccaatctagtttct

SEQ ID NO: 772 - DNA, 69 bp, Artificial Sequence
  37VL-D
gagggtgaagtctgtcccagacccactgccactaaacctggrtgggaycccagaaactagattggatgc

SEQ ID NO: 773 - DNA, 78 bp, Artificial Sequence
  37VL-E
gggacagacttcaccctcamcatcmrtyctstgsagmmggwggatkycgcaacctatyactgtcagcaaagtactgag

SEQ ID NO: 774 - DNA, 79 bp, Artificial Sequence
  37VL-F-BsiW1Spe1
actcagactagtcgtacgtttgatctccaccttggtcccttgaccgaacgtccacggatcctcagtactttgctgacag

SEQ ID NO: 775 - protein, 8 aa, Artificial Sequence
  Flag-tag
DYKDDDDK

SEQ ID NO: 776 - DNA, 4173 bp, Artificial Sequence
  human cMET construct
atgaaggcccccgctgtgcttgcacctggcatcctcgtgctcctgtttaccttggtgcagaggagcaatggggagtgtaaagaggcactagcaaagtccgagatgaatgtgaatatgaagtatcagcttcccaacttcaccgcggaaacacccatccagaatgtcattctacatgagcatcacattttccttggtgccactaactacatttatgttttaaatgaggaagaccttcagaaggttgctgagtacaagactgggcctgtgctggaacacccagattgtttcccatgtcaggactgcagcagcaaagccaatttatcaggaggtgtttggaaagataacatcaacatggctctagttgtggacacctactatgatgatcaactcattagctgtggcagcgtcaacagagggacctgccagcgacatgtctttccccacaatcatactgctgacatacagtcggaggttcactgcatattctccccacagatagaagagcccagccagtgtcctgactgtgtggtgagcgccctgggagccaaagtcctttcatctgtaaaggaccggttcatcaacttctttgtaggcaataccataaattcttcttatttcccagatcatccattgcattcgatatcagtgagaaggctaaaggaaacgaaagatggttttatgtttttgacggaccagtcctacattgatgttttacctgagttcagagattcttaccccattaagtatgtccatgcctttgaaagcaacaattttatttacttcttgacggtccaaagggaaactctagatgctcagacttttcacacaagaataatcaggttctgttccataaactctggattgcattcctacatggaaatgcctctggagtgtattctcacagaaaagagaaaaaagagatccacaaagaaggaagtgtttaatatacttcaggctgcgtatgtcagcaagcctggggcccagcttgctagacaaataggagccagcctgaatgatgacattcttttcggggtgttcgcacaaagcaagccagattctgccgaaccaatggatcgatctgccatgtgtgcattccctatcaaatatgtcaacgacttcttcaacaagatcgtcaacaaaaacaatgtgagatgtctccagcatttttacggacccaatcatgagcactgctttaataggacacttctgagaaattcatcaggctgtgaagcgcgccgtgatgaatatcgaacagagtttaccacagctttgcagcgcgttgacttattcatgggtcaattcagcgaagtcctcttaacatctatatccaccttcattaaaggagacctcaccatagctaatcttgggacatcagagggtcgcttcatgcaggttgtggtttctcgatcaggaccatcaacccctcatgtgaattttctcctggactcccatccagtgtctccagaagtgattgtggagcatacattaaaccaaaatggctacacactggttatcactgggaagaagatcacgaagatcccattgaatggcttgggctgcagacatttccagtcctgcagtcaatgcctctctgccccaccctttgttcagtgtggctggtgccacgacaaatgtgtgcgatcggaggaatgcctgagcgggacatggactcaacagatctgtctgcctgcaatctacaaggttttcccaaatagtgcaccccttgaaggagggacaaggctgaccatatgtggctgggactttggatttcggaggaataataaatttgatttaaagaaaactagagttctccttggaaatgagagctgcaccttgactttaagtgagagcacgatgaatacattgaaatgcacagttggtcctgccatgaataagcatttcaatatgtccataattatttcaaatggccacgggacaacacaatacagtacattctcctatgtggatcctgtaataacaagtatttcgccgaaatacggtcctatggctggtggcactttacttactttaactggaaattacctaaacagtgggaatagcagacacatttcaattggtggaaaaacatgtactttaaaaagtgtgtcaaacagtattcttgaatgttataccccagcccaaaccatttcaactgagtttgctgttaaattgaaaattgacttagccaaccgagagacaagcatcttcagttaccgtgaagatcccattgtctatgaaattcatccaaccaaatcttttattagtggtgggagcacaataacaggtgttgggaaaaacctgaactcagttagtgtcccgagaatggtcataaatgtgcatgaagcaggaaggaactttacagtggcatgtcaacatcgctctaattcagagataatctgttgtaccactccttccctgcaacagctgaatctgcaactccccctgaaaaccaaagcctttttcatgttagatgggatcctttccaaatactttgatctcatttatgtacataatcctgtgtttaagccttttgaaaagccagtgatgatctcaatgggcaatgaaaatgtactggaaattaagggaaatgatattgaccctgaagcagttaaaggtgaagtgttaaaagttggaaataagagctgtgagaatatacacttacattctgaagccgttttatgcacggtccccaatgacctgctgaaattgaacagcgagctaaatatagagtggaagcaagcaatttcttcaaccgtccttggaaaagtaatagttcaaccagatcagaatttcacaggattgattgctggtgttgtctcaatatcaacagcactgttattactacttgggtttttcctgtggctgaaaaagagaaagcaaattaaagatctgggcagtgaattagttcgctacgatgcaagagtacacactcctcatttggataggcttgtaagtgcccgaagtgtaagcccaactacagaaatggtttcaaatgaatctgtagactaccgagctacttttccagaagatcagtttcctaattcatctcagaacggttcatgccgacaagtgcagtatcctctgacagacatgtcccccatcctaactagtggggactctgatatatccagtccattactgcaaaatactgtccacattgacctcagtgctctaaatccagagctggtccaggcagtgcagcatgtagtgattgggcccagtagcctgattgtgcatttcaatgaagtcataggaagagggcattttggttgtgtatatcatgggactttgttggacaatgatggcaagaaaattcactgtgctgtgaaatccttgaacagaatcactgacataggagaagtttcccaatttctgaccgagggaatcatcatgaaagattttagtcatcccaatgtcctctcgctcctgggaatctgcctgcgaagtgaagggtctccgctggtggtcctaccatacatgaaacatggagatcttcgaaatttcattcgaaatgagactcataatccaactgtaaaagatcttattggctttggtcttcaagtagccaaaggcatgaaatatcttgcaagcaaaaagtttgtccacagagacttggctgcaagaaactgtatgctggatgaaaaattcacagtcaaggttgctgattttggtcttgccagagacatgtatgataaagaatactatagtgtacacaacaaaacaggtgcaaagctgccagtgaagtggatggctttggaaagtctgcaaactcaaaagtttaccaccaagtcagatgtgtggtcctttggcgtgctcctctgggagctgatgacaagaggagccccaccttatcctgacgtaaacacctttgatataactgtttacttgttgcaagggagaagactcctacaacccgaatactgcccagaccccttatatgaagtaatgctaaaatgctggcaccctaaagccgaaatgcgcccatccttttctgaactggtgtcccggatatcagcgatcttctctactttcattggggagcactatgtccatgtgaacgctacttatgtgaacgtaaaatgtgtcgctccgtatccttctctgttgtcatcagaagataacgctgatgatgaggtggacacacgaccagcctccttctgggagacatcatag

SEQ ID NO: 777 - protein, 1390 aa, Artificial Sequence
  human cMET construct
MKAPAVLAPGILVLLFTLVQRSNGECKEALAKSEMNVNMKYQLPNFTAETPIQNVILHEHHIFLGATNYIYVLNEEDLQKVAEYKTGPVLEHPDCFPCQDCSSKANLSGGVWKDNINMALVVDTYYDDQLISCGSVNRGTCQRHVFPHNHTADIQSEVHCIFSPQIEEPSQCPDCVVSALGAKVLSSVKDRFINFFVGNTINSSYFPDHPLHSISVRRLKETKDGFMFLTDQSYIDVLPEFRDSYPIKYVHAFESNNFIYFLTVQRETLDAQTFHTRIIRFCSINSGLHSYMEMPLECILTEKRKKRSTKKEVFNILQAAYVSKPGAQLARQIGASLNDDILFGVFAQSKPDSAEPMDRSAMCAFPIKYVNDFFNKIVNKNNVRCLQHFYGPNHEHCFNRTLLRNSSGCEARRDEYRTEFTTALQRVDLFMGQFSEVLLTSISTFIKGDLTIANLGTSEGRFMQVVVSRSGPSTPHVNFLLDSHPVSPEVIVEHTLNQNGYTLVITGKKITKIPLNGLGCRHFQSCSQCLSAPPFVQCGWCHDKCVRSEECLSGTWTQQICLPAIYKVFPNSAPLEGGTRLTICGWDFGFRRNNKFDLKKTRVLLGNESCTLTLSESTMNTLKCTVGPAMNKHFNMSIIISNGHGTTQYSTFSYVDPVITSISPKYGPMAGGTLLTLTGNYLNSGNSRHISIGGKTCTLKSVSNSILECYTPAQTISTEFAVKLKIDLANRETSIFSYREDPIVYEIHPTKSFISGGSTITGVGKNLNSVSVPRMVINVHEAGRNFTVACQHRSNSEIICCTTPSLQQLNLQLPLKTKAFFMLDGILSKYFDLIYVHNPVFKPFEKPVMISMGNENVLEIKGNDIDPEAVKGEVLKVGNKSCENIHLHSEAVLCTVPNDLLKLNSELNIEWKQAISSTVLGKVIVQPDQNFTGLIAGVVSISTALLLLLGFFLWLKKRKQIKDLGSELVRYDARVHTPHLDRLVSARSVSPTTEMVSNESVDYRATFPEDQFPNSSQNGSCRQVQYPLTDMSPILTSGDSDISSPLLQNTVHIDLSALNPELVQAVQHVVIGPSSLIVHFNEVIGRGHFGCVYHGTLLDNDGKKIHCAVKSLNRITDIGEVSQFLTEGIIMKDFSHPNVLSLLGICLRSEGSPLVVLPYMKHGDLRNFIRNETHNPTVKDLIGFGLQVAKGMKYLASKKFVHRDLAARNCMLDEKFTVKVADFGLARDMYDKEYYSVHNKTGAKLPVKWMALESLQTQKFTTKSDVWSFGVLLWELMTRGAPPYPDVNTFDITVYLLQGRRLLQPEYCPDPLYEVMLKCWHPKAEMRPSFSELVSRISAIFSTFIGEHYVHVNATYVNVKCVAPYPSLLSSEDNADDEVDTRPASFWETS

SEQ ID NO: 778 - DNA, 37 bp, Artificial Sequence
  forward primer
aggaattcaccatgaaggcccccgctgtgcttgcacc

SEQ ID NO: 779 - DNA, 23 bp, Artificial Sequence
  reverse primer
ctccagaggcatttccatgtagg

SEQ ID NO: 780 - DNA, 23 bp, Artificial Sequence
  forward primer
gtccaaagggaaactctagatgc

SEQ ID NO: 781 - DNA, 24 bp, Artificial Sequence
  reverse primer
ggagacactggatgggagtccagg

SEQ ID NO: 782 - DNA, 24 bp, Artificial Sequence
  forward primer
catcagagggtcgcttcatgcagg

SEQ ID NO: 783 - DNA, 24 bp, Artificial Sequence
  reverse primer
gctttggttttcagggggagttgc

SEQ ID NO: 784 - DNA, 28 bp, Artificial Sequence
  forward primer
atccaaccaaatcttttattagtggtgg

SEQ ID NO: 785 - DNA, 25 bp, Artificial Sequence
  reverse primer
gacttcattgaaatgcacaatcagg

SEQ ID NO: 786 - DNA, 23 bp, Artificial Sequence
  forward primer
tgctctaaatccagagctggtcc

SEQ ID NO: 787 - DNA, 26 bp, Artificial Sequence
  reverse primer
gtcagataagaaattccttagaatcc

SEQ ID NO: 788 - DNA, 4146 bp, Artificial Sequence
  macaque cMET construct
atgaaggcccccgctgtgcttgcacctggcatcctcgtgctcctgtttaccttggtgcagaggagcaatggggagtgtaaagaggcactagcaaagtccgagatgaatgtgaatatgaagtatcagcttcccaacttcaccgcggaaacagccatccagaatgtcattctacatgagcatcacattttcctcggtgccaccaactacatttatgttttaaatgaggaagaccttcagaaggttgctgagtacaagaccgggcctgtgctggaacacccagattgtttcccgtgtcaggactgcagcagcaaagccaatttatcaggaggcgtttggaaagataacatcaacatggctctggttgtggacacctactatgatgatcaactcattagctgtggcagcgtcaacagagggacctgccagcgacatgtctttccccataatcatactgctgacatacagtcggaggttcactgcatattctccccacagatagaagagcccaaccagtgccctgactgtgtggtgagcgccctgggagccaaagtcctttcatctgtaaaggaccggttcatcaacttctttgtaggcaataccataaattcttcttatttcccacatcatccgttgcattcgatatcagtgagaaggctaaaggaaacgaaagatggttttatgtttttgacagaccagtcctacattgatgttttacctgagttcagagattcttaccccattaagtacatccacgcttttgaaagcaacaattttatttacttcttgacggtccaaagggaaactctaaatgctcagacttttcacacaagaataatcaggttctgttccttaaactctggattgcactcctacatggaaatgcctctagagtgtattctcacagaaaagagaaaaaagagatccacaaagaaggaagtgtttaatatccttcaggctgcatatgtcagcaagcccggggcccagcttgctagacaaataggagccagcctgaatgatgacattctctttggggtgttcgcacaaagcaagccagattctgccgaaccaatggatcgatctgcaatgtgtgcatttcctatcaaatatgtcaacgacttcttcaacaagatcgtcaacaaaaacaatgtgagatgtctccagcatttttatggacccaatcatgagcactgttttaataggacacttctgagaaattcatcaggctgtgaagcgcgccgtgatgaatatcgagcagagtttaccacagctttgcagcgggttgacttattcatgggtcaattcagcgaagtcctcttaacatctatatccaccttcgtgaaaggagacctcaccatcgctaatcttgggacatcagagggtcgcttcatgcaggttgtggtttctcgatcaggaccatcaacccctcatgtgaattttctcctggactctcacccggtgtctccagaagtgattgtggagcatccattaaaccagaatggctacacactggttgtcacggggaagaagatcaccaagatcccattgaatggcttgggctgcagacatttccagtcctgcagtcagtgcctctctgccccaccctttgtgcagtgtggctggtgccacgacaaatgtgtgcgatcggaggaatgccccagtgggacatggactcaacagatctgtctgcctgcaatctacaaggttttcccaactagtgcaccccttgaaggagggacaaggctgaccatatgtggctgggactttggatttcggaggaataataaatttgatttaaagaaaactagagttctccttggaaatgagagctgcaccttgactttaagtgagagcacgatgaatacattgaaatgcacagttggtcctgccatgaataaacatttcaatatgtccataattatttcaaatggccacgggacaacacaatacagtacattttcctatgtggatcctataataacaagtatttcgccaaaatatggccctatggctggtggcactttacttactttaactggaaattacctaaacagtggcaattctagacacatttcaattggtggaaaaacatgtactttaaaaagtgtgtcaaacagtattctcgaatgttataccccagcccaaaccatttcaactgagtttgctgttaaattgaaaattgacttagccaaccgagagacaagcatcttcagttaccgggaagaccccattgtctatgaaattcatccaaccaaatcttttattagtggtgggagcacaataacaggtgttgggaaaaacctgcattcagttagtgtcccgaggatggtcataaatgtgcatgaagcaggaaggaactttacagtggcatgtcagcatcgctctaattcagagataatctgctgtaccactccttccctgcaacagctgaatctgcaactccccctgaaaaccaaagcctttttcatgttagatgggatcctttccaaatactttgatctcatttatgtacataatcctgtgtttaagccttttgaaaagccagtaatgatctcaatgggcaatgaaaatgtactggaaattaagggaaatgatattgaccctgaagcagttaaaggtgaagtgttaaaagttggaaataagagctgtgagaatatacacttacattctgaagccgttttatgcacggtccccaatgacctgctgaaattgaacagcgagctaaatatagagtggaagcaagcaatttcttcaaccgtccttggaaaagtaatagttcaaccagatcagaatttcaccggattgattgctggtgttgtctcaatatcaatagcactcttactactacttgggcttttcctgtggctgaaaaagagaaagcaaattaaagatctgggcagtgaattagttcgctatgatgcaagagtacacactcctcatttggataggcttgtaagtgcccgaagtgtaagcccaacaacagaaatggtttcaaatgaatctgtagactaccgagctacttttccagaagatcagtttcctaattcatctcagaacggttcatgccgacaagtgcagtatcctctgacagacatgtcccccatcctgactagtggggactctgatatatccagtccattactgcaaaacactgtccacattgacctcagcgctctaaatccagagctggtccaggcagtgcagcatgtagtgattgggcccagtagcctgattgtgcatttcaatgaagtcataggaagagggcattttggttgtgtatatcatgggactttgttggacaatgatggcaagaaaattcactgtgctgtgaaatccttgaacagaatcactgacataggagaagtttcccagtttctgaccgagggaatcatcatgaaagattttagtcatcccaatgtcctctcgctcctgggaatctgcctgcgaagtgaagggtctccgctggtggtcctaccctacatgaaacatggagatcttcgaaatttcattcgaaatgagactcataatccaactgtaaaagatcttattggctttggtcttcaagtagccaaaggcatgaaatatcttgcaagcaaaaagtttgtccacagagacttggctgcaagaaactgtatgctggatgaaaaattcacagtcaaggttgctgattttggtcttgccagagacatgtatgataaagaatactatagtgtgcacaacaaaacaggtgcaaagctgccagtgaagtggatggctttggaaagtctgcaaactcaaaagtttaccaccaagtcagatgtgtggtcctttggtgtgctcctctgggagctcatgacaagaggagccccaccctatcctgatgtgaacacctttgatataactgtttacttgttgcaagggagaaggctcctacaacccgaatactgcccagaccccttatatgaagtaatgctaaaatgctggcaccctaaagcagaaatgcgcccatccttttctgaactggtgtcccggatatcagcgatcttctctactttcattggggagcactacgtccatgtaaacgctacttatgtgaacgtaaaatgtgtcgctccatatccttctctgttgtcatcagaagataacgctgatgacgaggtggacacatga

SEQ ID NO: 789 - protein, 1381 aa, Artificial Sequence
  macaque cMET construct
MKAPAVLAPGILVLLFTLVQRSNGECKEALAKSEMNVNMKYQLPNFTAETAIQNVILHEHHIFLGATNYIYVLNEEDLQKVAEYKTGPVLEHPDCFPCQDCSSKANLSGGVWKDNINMALVVDTYYDDQLISCGSVNRGTCQRHVFPHNHTADIQSEVHCIFSPQIEEPNQCPDCVVSALGAKVLSSVKDRFINFFVGNTINSSYFPHHPLHSISVRRLKETKDGFMFLTDQSYIDVLPEFRDSYPIKYIHAFESNNFIYFLTVQRETLNAQTFHTRIIRFCSLNSGLHSYMEMPLECILTEKRKKRSTKKEVFNILQAAYVSKPGAQLARQIGASLNDDILFGVFAQSKPDSAEPMDRSAMCAFPIKYVNDFFNKIVNKNNVRCLQHFYGPNHEHCFNRTLLRNSSGCEARRDEYRAEFTTALQRVDLFMGQFSEVLLTSISTFVKGDLTIANLGTSEGRFMQVVVSRSGPSTPHVNFLLDSHPVSPEVIVEHPLNQNGYTLVVTGKKITKIPLNGLGCRHFQSCSQCLSAPPFVQCGWCHDKCVRSEECPSGTWTQQICLPAIYKVFPTSAPLEGGTRLTICGWDFGFRRNNKFDLKKTRVLLGNESCTLTLSESTMNTLKCTVGPAMNKHFNMSIIISNGHGTTQYSTFSYVDPIITSISPKYGPMAGGTLLTLTGNYLNSGNSRHISIGGKTCTLKSVSNSILECYTPAQTISTEFAVKLKIDLANRETSIFSYREDPIVYEIHPTKSFISGGSTITGVGKNLHSVSVPRMVINVHEAGRNFTVACQHRSNSEIICCTTPSLQQLNLQLPLKTKAFFMLDGILSKYFDLIYVHNPVFKPFEKPVMISMGNENVLEIKGNDIDPEAVKGEVLKVGNKSCENIHLHSEAVLCTVPNDLLKLNSELNIEWKQAISSTVLGKVIVQPDQNFTGLIAGVVSISIALLLLLGLFLWLKKRKQIKDLGSELVRYDARVHTPHLDRLVSARSVSPTTEMVSNESVDYRATFPEDQFPNSSQNGSCRQVQYPLTDMSPILTSGDSDISSPLLQNTVHIDLSALNPELVQAVQHVVIGPSSLIVHFNEVIGRGHFGCVYHGTLLDNDGKKIHCAVKSLNRITDIGEVSQFLTEGIIMKDFSHPNVLSLLGICLRSEGSPLVVLPYMKHGDLRNFIRNETHNPTVKDLIGFGLQVAKGMKYLASKKFVHRDLAARNCMLDEKFTVKVADFGLARDMYDKEYYSVHNKTGAKLPVKWMALESLQTQKFTTKSDVWSFGVLLWELMTRGAPPYPDVNTFDITVYLLQGRRLLQPEYCPDPLYEVMLKCWHPKAEMRPSFSELVSRISAIFSTFIGEHYVHVNATYVNVKCVAPYPSLLSSEDNADDEVDT

SEQ ID NO: 790 - DNA, 81 bp, Artificial Sequence
  CM1-VH-A-XhoI
ccatgtctcgagtctgggsctgaastgrwgargcctggggcttcagtgaaartgtcctgcarggcttcgggctataccttc

SEQ ID NO: 791 - DNA, 74 bp, Artificial Sequence
  CM1-VH-B
atccactcaagccyttgtccaggcsyctgtytaacccagtgcaaccagtagctggtgaaggtatagcccgaagc

SEQ ID NO: 792 - DNA, 68 bp, Artificial Sequence
  CM1-VH-C
ggcttgagtggatkggcatgattgatccttccaatagtgacactaggtttaatccgaacttcaaggac

SEQ ID NO: 793 - DNA, 75 bp, Artificial Sequence
  CM1-VH-D
gctgctgagcwscatgtaggctgtgytggmagatstgtctmyaktsawtgtgrccytgtccttgaagttcggatt

SEQ ID NO: 794 - DNA, 75 bp, Artificial Sequence
  CM1-VH-E
gcctacatgswactcagcagcctgasatctgmggacactgcagtctattactgtgccasatatggtagctacgtt

SEQ ID NO: 795 - DNA, 60 bp, Artificial Sequence
  CM1-VH-F-BstEII
catgtaggtgaccgaggttccttgaccccagtagtccagaggggaaacgtagctaccata

SEQ ID NO: 796 - DNA, 69 bp, Artificial Sequence
  CM3-VH-A-XhoI
ccatgtctcgagtctgggrctgaastgrwgaagcctggggcttcagtgaagstgtcctgcaaggcttct

SEQ ID NO: 797 - DNA, 78 bp, Artificial Sequence
  CM3-VH-B
ctcaaggccttgtccaggcsyctgcytcacccagtgtatccagtaactggtgaaggtgtagccagaagccttgcagga

SEQ ID NO: 798 - DNA, 72 bp, Artificial Sequence
  CM3-VH-C
cctggacaaggccttgagtggatkggagagattaatcctagcagcggtcgtactaactacaacgagaaattc

SEQ ID NO: 799 - DNA, 61 bp, Artificial Sequence
  CM3-VH-D
ctgtggaggtagatktgtctmyagtcaytgtgaccytgttcttgaatttctcgttgtagtt

SEQ ID NO: 800 - DNA, 70 bp, Artificial Sequence
  CM3-VH-E
atctacctccacagyctacatgsaactcagcarcctgasatctgaggacactgcggtctattactgtgca

SEQ ID NO: 801 - DNA, 60 bp, Artificial Sequence
  CM3-VH-F-BstEII
catgtaggtgaccgtggtgccttggccccagtagcccctwcttgcacagtaatagaccgc

SEQ ID NO: 802 - DNA, 84 bp, Artificial Sequence
  CM1-VL-A-SacI
cctgtagagctcgtgatgacccagactccayyctccctamctgtgacasytggagagmmggyttctrtcagctgcaagtccagt

SEQ ID NO: 803 - DNA, 65 bp, Artificial Sequence
  CM1-VL-B
gtaccaggccaagtagttcttctgactgctagtatataaaagggactgactggacttgcagctga

SEQ ID NO: 804 - DNA, 69 bp, Artificial Sequence
  CM1-VL-C
tacttggcctggtaccwgcagaaaccaggtcagtctcctmaactgctgatttactgggcatccactagg

SEQ ID NO: 805 - DNA, 75 bp, Artificial Sequence
  CM1-VL-D
gagagtgaaatctgtcccagatccactgcctgagaagcgatcagggaccccagattccctagtggatgcccagta

SEQ ID NO: 806 - DNA, 69 bp, Artificial Sequence
  CM1-VL-E
acagatttcactctcamaatctccagwgtgraggctgasgacstggsagtttattactgtcagcaatat

SEQ ID NO: 807 - DNA, 84 bp, Artificial Sequence
  CM1-VL-F-BsiWI/SpeI
cctcagactagtcgtacgtttgatctccaactttgtgcctccaccgaacgtccacggataggcataatattgctgacagtaata

SEQ ID NO: 808 - DNA, 75 bp, Artificial Sequence
  CM3-VL-A-SacI
cctgtagagctcgtgatgacccaatctccasyttctttgsctgtgactctagggcagcsggcctccatctcctgc

SEQ ID NO: 809 - DNA, 66 bp, Artificial Sequence
  CM3-VL-Ba
gaaccaactcatataactaccaccatcataatcaacactttggctggccttgcaggagatggaggc

SEQ ID NO: 810 - DNA, 69 bp, Artificial Sequence
  CM3-VL-Bb
gaaccaactcatataactaccaccatcataatcaacactagattggctggccttgcaggagatggaggc

SEQ ID NO: 811 - DNA, 72 bp, Artificial Sequence
  CM3-VL-C
agttatatgagttggttccaacagagaccaggacagycacccarackcctcatctmtgctgcatccaatcta

SEQ ID NO: 812 - DNA, 69 bp, Artificial Sequence
  CM3-VL-D
ggtgaagtctgtcccagagccactgccactaaacctgkctgggaycccagattctagattggatgcagc

SEQ ID NO: 813 - DNA, 75 bp, Artificial Sequence
  CM3-VL-E
tctgggacagacttcaccctcaakatcymtcstgtggaggmggaggatgttgsaryctattactgtcagcaaagt

SEQ ID NO: 814 - DNA, 84 bp, Artificial Sequence
  CM3-VL-F-BsiWI/SpeI
cctcagactagtcgtacgtttgatctccagcttggtcccctgaccgaacgtgagcggatcctcataactttgctgacagtaata

SEQ ID NO: 815 - protein, 113 aa, Artificial Sequence
  MET-1 L
DIMMSQSPSSLTVSVGEKVTVSCKSSQSLLYTSSQKNYLAWYQQKPGQSPKLLIYWASTRESGVPDRFTGSGSGTDFTLTITSVKADDLAVYYCQQYYAYPWTFGGGTKLEIK

SEQ ID NO: 816 - protein, 17 aa, Artificial Sequence
  MET-1 L-CDR1
KSSQSLLYTSSQKNYLA

SEQ ID NO: 817 - protein, 7 aa, Artificial Sequence
  MET-1 L-CDR2
WASTRES

SEQ ID NO: 818 - protein, 9 aa, Artificial Sequence
  MET-1 L-CDR3
QQYYAYPWT

SEQ ID NO: 819 - DNA, 339 bp, Artificial Sequence
  MET-1 L
gatattatgatgagtcagtcccccagcagcctgaccgtgtccgtgggcgagaaggtgaccgtgtcttgcaagagcagccagagcctgctgtacaccagcagccagaagaactatctggcttggtatcagcagaagcccggccagagcccaaagctgctgatctactgggccagcacccgggagagcggagtgcccgacagattcaccggcagcggctccggcacagacttcaccctgaccatcaccagcgtgaaggccgacgacctggccgtgtactactgccagcagtactacgcctacccctggaccttcggcggagggaccaagctggagatcaag

SEQ ID NO: 820 - protein, 119 aa, Artificial Sequence
  MET-1 H
QVQLQQSGPELVRPGASVKMSCRASGYTFTSYWLHWVKQRPGQGLEWIGMIDPSNSDTRFNPNFKDKATLNVDRSSNTAYMLLSSLTSADSAVYYCATYGSYVSPLDYWGQGTSVTVSS

SEQ ID NO: 821 - protein, 5 aa, Artificial Sequence
  MET-1 H-CDR1
SYWLH

SEQ ID NO: 822 - protein, 17 aa, Artificial Sequence
  MET-1 H-CDR2
MIDPSNSDTRFNPNFKD

SEQ ID NO: 823 - protein, 10 aa, Artificial Sequence
  MET-1 H-CDR3
YGSYVSPLDY

SEQ ID NO: 824 - DNA, 357 bp, Artificial Sequence
  MET-1 H
caggtgcagctgcagcagagcggacccgagctggtgcggccaggcgcctccgtgaagatgagctgcagggccagcggctacaccttcaccagctactggctgcactgggtgaaacagagacctggacagggactggagtggatcggcatgatcgaccccagcaacagcgacaccaggttcaaccccaacttcaaggacaaggccaccctgaacgtggacaggtccagcaacaccgcctacatgctgctgtccagcctgacctctgccgacagcgccgtgtattactgtgccacctacggcagctacgtgtcccccctggactactggggccagggcacctctgtgacagtgtcctcc

SEQ ID NO: 825 - protein, 247 aa, Artificial Sequence
  MET-1 HL
QVQLQQSGPELVRPGASVKMSCRASGYTFTSYWLHWVKQRPGQGLEWIGMIDPSNSDTRFNPNFKDKATLNVDRSSNTAYMLLSSLTSADSAVYYCATYGSYVSPLDYWGQGTSVTVSSGGGGSGGGGSGGGGSDIMMSQSPSSLTVSVGEKVTVSCKSSQSLLYTSSQKNYLAWYQQKPGQSPKLLIYWASTRESGVPDRFTGSGSGTDFTLTITSVKADDLAVYYCQQYYAYPWTFGGGTKLEIK

SEQ ID NO: 826 - DNA, 741 bp, Artificial Sequence
  MET-1 HL
caggtgcagctgcagcagagcggacccgagctggtgcggccaggcgcctccgtgaagatgagctgcagggccagcggctacaccttcaccagctactggctgcactgggtgaaacagagacctggacagggactggagtggatcggcatgatcgaccccagcaacagcgacaccaggttcaaccccaacttcaaggacaaggccaccctgaacgtggacaggtccagcaacaccgcctacatgctgctgtccagcctgacctctgccgacagcgccgtgtattactgtgccacctacggcagctacgtgtcccccctggactactggggccagggcacctctgtgacagtgtcctccggtggtggtggttctggcggcggcggctccggtggtggtggttctgatattatgatgagtcagtcccccagcagcctgaccgtgtccgtgggcgagaaggtgaccgtgtcttgcaagagcagccagagcctgctgtacaccagcagccagaagaactatctggcttggtatcagcagaagcccggccagagcccaaagctgctgatctactgggccagcacccgggagagcggagtgcccgacagattcaccggcagcggctccggcacagacttcaccctgaccatcaccagcgtgaaggccgacgacctggccgtgtactactgccagcagtactacgcctacccctggaccttcggcggagggaccaagctggagatcaag

SEQ ID NO: 827 - protein, 247 aa, Artificial Sequence
  MET-1 LH
DIMMSQSPSSLTVSVGEKVTVSCKSSQSLLYTSSQKNYLAWYQQKPGQSPKLLIYWASTRESGVPDRFTGSGSGTDFTLTITSVKADDLAVYYCQQYYAYPWTFGGGTKLEIKGGGGSGGGGSGGGGSQVQLQQSGPELVRPGASVKMSCRASGYTFTSYWLHWVKQRPGQGLEWIGMIDPSNSDTRFNPNFKDKATLNVDRSSNTAYMLLSSLTSADSAVYYCATYGSYVSPLDYWGQGTSVTVSS

SEQ ID NO: 828 - DNA, 741 bp, Artificial Sequence
  MET-1 LH
gatattatgatgagtcagtcccccagcagcctgaccgtgtccgtgggcgagaaggtgaccgtgtcttgcaagagcagccagagcctgctgtacaccagcagccagaagaactatctggcttggtatcagcagaagcccggccagagcccaaagctgctgatctactgggccagcacccgggagagcggagtgcccgacagattcaccggcagcggctccggcacagacttcaccctgaccatcaccagcgtgaaggccgacgacctggccgtgtactactgccagcagtactacgcctacccctggaccttcggcggagggaccaagctggagatcaagggtggtggtggttctggcggcggcggctccggtggtggtggttctcaggtgcagctgcagcagagcggacccgagctggtgcggccaggcgcctccgtgaagatgagctgcagggccagcggctacaccttcaccagctactggctgcactgggtgaaacagagacctggacagggactggagtggatcggcatgatcgaccccagcaacagcgacaccaggttcaaccccaacttcaaggacaaggccaccctgaacgtggacaggtccagcaacaccgcctacatgctgctgtccagcctgacctctgccgacagcgccgtgtattactgtgccacctacggcagctacgtgtcccccctggactactggggccagggcacctctgtgacagtgtcctcc

SEQ ID NO: 829 - protein, 502 aa, Artificial Sequence
  MET-1 HL x I2C HL
QVQLQQSGPELVRPGASVKMSCRASGYTFTSYWLHWVKQRPGQGLEWIGMIDPSNSDTRFNPNFKDKATLNVDRSSNTAYMLLSSLTSADSAVYYCATYGSYVSPLDYWGQGTSVTVSSGGGGSGGGGSGGGGSDIMMSQSPSSLTVSVGEKVTVSCKSSQSLLYTSSQKNYLAWYQQKPGQSPKLLIYWASTRESGVPDRFTGSGSGTDFTLTITSVKADDLAVYYCQQYYAYPWTFGGGTKLEIKSGGGGSEVQLVESGGGLVQPGGSLKLSCAASGFTFNKYAMNWVRQAPGKGLEWVARIRSKYNNYATYYADSVKDRFTISRDDSKNTAYLQMNNLKTEDTAVYYCVRHGNFGNSYISYWAYWGQGTLVTVSSGGGGSGGGGSGGGGSQTVVTQEPSLTVSPGGTVTLTCGSSTGAVTSGNYPNWVQQKPGQAPRGLIGGTKFLAPGTPARFSGSLLGGKAALTLSGVQPEDEAEYYCVLWYSNRWVFGGGTKLTVL

SEQ ID NO: 830 - DNA, 1506 bp, Artificial Sequence
  MET-1 HL x I2C HL
caggtgcagctgcagcagagcggacccgagctggtgcggccaggcgcctccgtgaagatgagctgcagggccagcggctacaccttcaccagctactggctgcactgggtgaaacagagacctggacagggactggagtggatcggcatgatcgaccccagcaacagcgacaccaggttcaaccccaacttcaaggacaaggccaccctgaacgtggacaggtccagcaacaccgcctacatgctgctgtccagcctgacctctgccgacagcgccgtgtattactgtgccacctacggcagctacgtgtcccccctggactactggggccagggcacctctgtgacagtgtcctccggtggtggtggttctggcggcggcggctccggtggtggtggttctgatattatgatgagtcagtcccccagcagcctgaccgtgtccgtgggcgagaaggtgaccgtgtcttgcaagagcagccagagcctgctgtacaccagcagccagaagaactatctggcttggtatcagcagaagcccggccagagcccaaagctgctgatctactgggccagcacccgggagagcggagtgcccgacagattcaccggcagcggctccggcacagacttcaccctgaccatcaccagcgtgaaggccgacgacctggccgtgtactactgccagcagtactacgcctacccctggaccttcggcggagggaccaagctggagatcaagtccggaggtggtggatccgaggtgcagctggtcgagtctggaggaggattggtgcagcctggagggtcattgaaactctcatgtgcagcctctggattcaccttcaataagtacgccatgaactgggtccgccaggctccaggaaagggtttggaatgggttgctcgcataagaagtaaatataataattatgcaacatattatgccgattcagtgaaagacaggttcaccatctccagagatgattcaaaaaacactgcctatctacaaatgaacaacttgaaaactgaggacactgccgtgtactactgtgtgagacatgggaacttcggtaatagctacatatcctactgggcttactggggccaagggactctggtcaccgtctcctcaggtggtggtggttctggcggcggcggctccggtggtggtggttctcagactgttgtgactcaggaaccttcactcaccgtatcacctggtggaacagtcacactcacttgtggctcctcgactggggctgttacatctggcaactacccaaactgggtccaacaaaaaccaggtcaggcaccccgtggtctaataggtgggactaagttcctcgcccccggtactcctgccagattctcaggctccctgcttggaggcaaggctgccctcaccctctcaggggtacagccagaggatgaggcagaatattactgtgttctatggtacagcaaccgctgggtgttcggtggaggaaccaaactgactgtccta

SEQ ID NO: 831 - protein, 501 aa, Artificial Sequence
  MET-1 LH x I2C HL
DIMMSQSPSSLTVSVGEKVTVSCKSSQSLLYTSSQKNYLAWYQQKPGQSPKLLIYWASTRESGVPDRFTGSGSGTDFTLTITSVKADDLAVYYCQQYYAYPWTFGGGTKLEIKGGGGSGGGGSGGGGSQVQLQQSGPELVRPGASVKMSCRASGYTFTSYWLHWVKQRPGQGLEWIGMIDPSNSDTRFNPNFKDKATLNVDRSSNTAYMLLSSLTSADSAVYYCATYGSYVSPLDYWGQGTSVTVSSGGGGSEVQLVESGGGLVQPGGSLKLSCAASGFTFNKYAMNWVRQAPGKGLEWVARIRSKYNNYATYYADSVKDRFTISRDDSKNTAYLQMNNLKTEDTAVYYCVRHGNFGNSYISYWAYWGQGTLVTVSSGGGGSGGGGSGGGGSQTVVTQEPSLTVSPGGTVTLTCGSSTGAVTSGNYPNWVQQKPGQAPRGLIGGTKFLAPGTPARFSGSLLGGKAALTLSGVQPEDEAEYYCVLWYSNRWVFGGGTKLTVL

SEQ ID NO: 832 - DNA, 1503 bp, Artificial Sequence
  MET-1 LH x I2C HL
gatattatgatgagtcagtcccccagcagcctgaccgtgtccgtgggcgagaaggtgaccgtgtcttgcaagagcagccagagcctgctgtacaccagcagccagaagaactatctggcttggtatcagcagaagcccggccagagcccaaagctgctgatctactgggccagcacccgggagagcggagtgcccgacagattcaccggcagcggctccggcacagacttcaccctgaccatcaccagcgtgaaggccgacgacctggccgtgtactactgccagcagtactacgcctacccctggaccttcggcggagggaccaagctggagatcaagggtggtggtggttctggcggcggcggctccggtggtggtggttctcaggtgcagctgcagcagagcggacccgagctggtgcggccaggcgcctccgtgaagatgagctgcagggccagcggctacaccttcaccagctactggctgcactgggtgaaacagagacctggacagggactggagtggatcggcatgatcgaccccagcaacagcgacaccaggttcaaccccaacttcaaggacaaggccaccctgaacgtggacaggtccagcaacaccgcctacatgctgctgtccagcctgacctctgccgacagcgccgtgtattactgtgccacctacggcagctacgtgtcccccctggactactggggccagggcacctctgtgacagtgtcctccggaggtggtggatccgaggtgcagctggtcgagtctggaggaggattggtgcagcctggagggtcattgaaactctcatgtgcagcctctggattcaccttcaataagtacgccatgaactgggtccgccaggctccaggaaagggtttggaatgggttgctcgcataagaagtaaatataataattatgcaacatattatgccgattcagtgaaagacaggttcaccatctccagagatgattcaaaaaacactgcctatctacaaatgaacaacttgaaaactgaggacactgccgtgtactactgtgtgagacatgggaacttcggtaatagctacatatcctactgggcttactggggccaagggactctggtcaccgtctcctcaggtggtggtggttctggcggcggcggctccggtggtggtggttctcagactgttgtgactcaggaaccttcactcaccgtatcacctggtggaacagtcacactcacttgtggctcctcgactggggctgttacatctggcaactacccaaactgggtccaacaaaaaccaggtcaggcaccccgtggtctaataggtgggactaagttcctcgcccccggtactcctgccagattctcaggctccctgcttggaggcaaggctgccctcaccctctcaggggtacagccagaggatgaggcagaatattactgtgttctatggtacagcaaccgctgggtgttcggtggaggaaccaaactgactgtccta

SEQ ID NO: 833 - protein, 15 aa, Artificial Sequence
  MET-3 L-CDR1
KASQSVDYDGGSYMS

SEQ ID NO: 834 - protein, 7 aa, Artificial Sequence
  MET-3 L-CDR2
AASNLES

SEQ ID NO: 835 - protein, 9 aa, Artificial Sequence
  MET-3 L-CDR3
QQSYEDPLT

SEQ ID NO: 836 - protein, 5 aa, Artificial Sequence
  MET-3 H-CDR1
SYWIH

SEQ ID NO: 837 - protein, 17 aa, Artificial Sequence
  MET-3 H-CDR2
EINPSSGRTNYNEKFKN

SEQ ID NO: 838 - protein, 3 aa, Artificial Sequence
  MET-3 H-CDR3
RGY

SEQ ID NO: 839 - protein, 107 aa, Artificial Sequence
  MET 4 L
DIQMTQSPSSVSASVGDRVTITCRASQGINTWLAWYQQKPGKAPKLLIYAASSLKSGVPSRFSGSGSGADFTLTISSLQPEDFATYYCQQANSFPLTFGGGTKVEIK

SEQ ID NO: 840 - protein, 11 aa, Artificial Sequence
  MET-4 L-CDR1
RASQGINTWLA

SEQ ID NO: 841 - protein, 7 aa, Artificial Sequence
  MET-4 L-CDR2
AASSLKS

SEQ ID NO: 842 - protein, 9 aa, Artificial Sequence
  MET-4 L-CDR3
QQANSFPLT

SEQ ID NO: 843 - DNA, 321 bp, Artificial Sequence
  MET-4 L
gacatccagatgacccagagccccagcagcgtgtctgccagcgtgggcgacagagtgaccatcacatgtagagctagccagggcatcaacacctggctggcctggtatcagcagaagcccggcaaggcccccaagctgctgatctacgccgcttcctccctgaaatctggcgtgcccagcagattcagcggcagcggaagcggagccgacttcaccctgaccatcagcagcctgcagcccgaggacttcgccacctactactgccagcaggccaacagcttccccctgaccttcggcggagggaccaaggtggagatcaag

SEQ ID NO: 844 - protein, 117 aa, Artificial Sequence
  MET-4 H
QVQLVQSGAEVKKPGASVKVSCEASGYTFTSYGFSWVRQAPGQGLEWMGWISASNGNTYYAQKLQGRVTMTTDTSTSSAYMELRSLRSDDTAVYYCARVYADYADYWGQGTLVTVSS

SEQ ID NO: 845 - protein, 5 aa, Artificial Sequence
  MET-4 H-CDR1
SYGFS

SEQ ID NO: 846 - protein, 17 aa, Artificial Sequence
  MET-4 H-CDR2
WISASNGNTYYAQKLQG

SEQ ID NO: 847 - protein, 8 aa, Artificial Sequence
  MET-4 H-CDR3
VYADYADY

SEQ ID NO: 848 - DNA, 351 bp, Artificial Sequence
  MET-4 H
caggtgcagctggtgcagagcggcgctgaggtgaagaagccaggcgccagcgtcaaggtgtcctgcgaggccagcggctacaccttcaccagctacggcttcagctgggtgcggcaggctcctggacagggactggaatggatgggctggatcagcgccagcaacggcaacacctactacgcccagaagctgcagggccgcgtcaccatgaccaccgacaccagcaccagcagcgcctacatggagctgagaagcctgagatccgacgacaccgccgtgtactactgcgccagggtgtacgccgactacgctgactactggggccagggcaccctggtgacagtgtcttcc

SEQ ID NO: 849 - protein, 239 aa, Artificial Sequence
  MET-4 HL
QVQLVQSGAEVKKPGASVKVSCEASGYTFTSYGFSWVRQAPGQGLEWMGWISASNGNTYYAQKLQGRVTMTTDTSTSSAYMELRSLRSDDTAVYYCARVYADYADYWGQGTLVTVSSGGGGSGGGGSGGGGSDIQMTQSPSSVSASVGDRVTITCRASQGINTWLAWYQQKPGKAPKLLIYAASSLKSGVPSRFSGSGSGADFTLTISSLQPEDFATYYCQQANSFPLTFGGGTKVEIK

SEQ ID NO: 850 - DNA, 717 bp, Artificial Sequence
  MET-4 HL
caggtgcagctggtgcagagcggcgctgaggtgaagaagccaggcgccagcgtcaaggtgtcctgcgaggccagcggctacaccttcaccagctacggcttcagctgggtgcggcaggctcctggacagggactggaatggatgggctggatcagcgccagcaacggcaacacctactacgcccagaagctgcagggccgcgtcaccatgaccaccgacaccagcaccagcagcgcctacatggagctgagaagcctgagatccgacgacaccgccgtgtactactgcgccagggtgtacgccgactacgctgactactggggccagggcaccctggtgacagtgtcttccggtggtggtggttctggcggcggcggctccggtggtggtggttctgacatccagatgacccagagccccagcagcgtgtctgccagcgtgggcgacagagtgaccatcacatgtagagctagccagggcatcaacacctggctggcctggtatcagcagaagcccggcaaggcccccaagctgctgatctacgccgcttcctccctgaaatctggcgtgcccagcagattcagcggcagcggaagcggagccgacttcaccctgaccatcagcagcctgcagcccgaggacttcgccacctactactgccagcaggccaacagcttccccctgaccttcggcggagggaccaaggtggagatcaag

SEQ ID NO: 851 - protein, 239 aa, Artificial Sequence
  MET-4 LH
DIQMTQSPSSVSASVGDRVTITCRASQGINTWLAWYQQKPGKAPKLLIYAASSLKSGVPSRFSGSGSGADFTLTISSLQPEDFATYYCQQANSFPLTFGGGTKVEIKGGGGSGGGGSGGGGSQVQLVQSGAEVKKPGASVKVSCEASGYTFTSYGFSWVRQAPGQGLEWMGWISASNGNTYYAQKLQGRVTMTTDTSTSSAYMELRSLRSDDTAVYYCARVYADYADYWGQGTLVTVSS

SEQ ID NO: 852 - DNA, 717 bp, Artificial Sequence
  MET-4 LH
gacatccagatgacccagagccccagcagcgtgtctgccagcgtgggcgacagagtgaccatcacatgtagagctagccagggcatcaacacctggctggcctggtatcagcagaagcccggcaaggcccccaagctgctgatctacgccgcttcctccctgaaatctggcgtgcccagcagattcagcggcagcggaagcggagccgacttcaccctgaccatcagcagcctgcagcccgaggacttcgccacctactactgccagcaggccaacagcttccccctgaccttcggcggagggaccaaggtggagatcaagggtggtggtggttctggcggcggcggctccggtggtggtggttctcaggtgcagctggtgcagagcggcgctgaggtgaagaagccaggcgccagcgtcaaggtgtcctgcgaggccagcggctacaccttcaccagctacggcttcagctgggtgcggcaggctcctggacagggactggaatggatgggctggatcagcgccagcaacggcaacacctactacgcccagaagctgcagggccgcgtcaccatgaccaccgacaccagcaccagcagcgcctacatggagctgagaagcctgagatccgacgacaccgccgtgtactactgcgccagggtgtacgccgactacgctgactactggggccagggcaccctggtgacagtgtcttcc

SEQ ID NO: 853 - protein, 494 aa, Artificial Sequence
  MET-4 HL x I2C HL
QVQLVQSGAEVKKPGASVKVSCEASGYTFTSYGFSWVRQAPGQGLEWMGWISASNGNTYYAQKLQGRVTMTTDTSTSSAYMELRSLRSDDTAVYYCARVYADYADYWGQGTLVTVSSGGGGSGGGGSGGGGSDIQMTQSPSSVSASVGDRVTITCRASQGINTWLAWYQQKPGKAPKLLIYAASSLKSGVPSRFSGSGSGADFTLTISSLQPEDFATYYCQQANSFPLTFGGGTKVEIKSGGGGSEVQLVESGGGLVQPGGSLKLSCAASGFTFNKYAMNWVRQAPGKGLEWVARIRSKYNNYATYYADSVKDRFTISRDDSKNTAYLQMNNLKTEDTAVYYCVRHGNFGNSYISYWAYWGQGTLVTVSSGGGGSGGGGSGGGGSQTVVTQEPSLTVSPGGTVTLTCGSSTGAVTSGNYPNWVQQKPGQAPRGLIGGTKFLAPGTPARFSGSLLGGKAALTLSGVQPEDEAEYYCVLWYSNRWVFGGGTKLTVL

SEQ ID NO: 854 - DNA, 1482 bp, Artificial Sequence
  MET-4 HL x I2C HL
caggtgcagctggtgcagagcggcgctgaggtgaagaagccaggcgccagcgtcaaggtgtcctgcgaggccagcggctacaccttcaccagctacggcttcagctgggtgcggcaggctcctggacagggactggaatggatgggctggatcagcgccagcaacggcaacacctactacgcccagaagctgcagggccgcgtcaccatgaccaccgacaccagcaccagcagcgcctacatggagctgagaagcctgagatccgacgacaccgccgtgtactactgcgccagggtgtacgccgactacgctgactactggggccagggcaccctggtgacagtgtcttccggtggtggtggttctggcggcggcggctccggtggtggtggttctgacatccagatgacccagagccccagcagcgtgtctgccagcgtgggcgacagagtgaccatcacatgtagagctagccagggcatcaacacctggctggcctggtatcagcagaagcccggcaaggcccccaagctgctgatctacgccgcttcctccctgaaatctggcgtgcccagcagattcagcggcagcggaagcggagccgacttcaccctgaccatcagcagcctgcagcccgaggacttcgccacctactactgccagcaggccaacagcttccccctgaccttcggcggagggaccaaggtggagatcaagtccggaggtggtggatccgaggtgcagctggtcgagtctggaggaggattggtgcagcctggagggtcattgaaactctcatgtgcagcctctggattcaccttcaataagtacgccatgaactgggtccgccaggctccaggaaagggtttggaatgggttgctcgcataagaagtaaatataataattatgcaacatattatgccgattcagtgaaagacaggttcaccatctccagagatgattcaaaaaacactgcctatctacaaatgaacaacttgaaaactgaggacactgccgtgtactactgtgtgagacatgggaacttcggtaatagctacatatcctactgggcttactggggccaagggactctggtcaccgtctcctcaggtggtggtggttctggcggcggcggctccggtggtggtggttctcagactgttgtgactcaggaaccttcactcaccgtatcacctggtggaacagtcacactcacttgtggctcctcgactggggctgttacatctggcaactacccaaactgggtccaacaaaaaccaggtcaggcaccccgtggtctaataggtgggactaagttcctcgcccccggtactcctgccagattctcaggctccctgcttggaggcaaggctgccctcaccctctcaggggtacagccagaggatgaggcagaatattactgtgttctatggtacagcaaccgctgggtgttcggtggaggaaccaaactgactgtccta

SEQ ID NO: 855 - protein, 493 aa, Artificial Sequence
  MET-4 LH x I2C HL
DIQMTQSPSSVSASVGDRVTITCRASQGINTWLAWYQQKPGKAPKLLIYAASSLKSGVPSRFSGSGSGADFTLTISSLQPEDFATYYCQQANSFPLTFGGGTKVEIKGGGGSGGGGSGGGGSQVQLVQSGAEVKKPGASVKVSCEASGYTFTSYGFSWVRQAPGQGLEWMGWISASNGNTYYAQKLQGRVTMTTDTSTSSAYMELRSLRSDDTAVYYCARVYADYADYWGQGTLVTVSSGGGGSEVQLVESGGGLVQPGGSLKLSCAASGFTFNKYAMNWVRQAPGKGLEWVARIRSKYNNYATYYADSVKDRFTISRDDSKNTAYLQMNNLKTEDTAVYYCVRHGNFGNSYISYWAYWGQGTLVTVSSGGGGSGGGGSGGGGSQTVVTQEPSLTVSPGGTVTLTCGSSTGAVTSGNYPNWVQQKPGQAPRGLIGGTKFLAPGTPARFSGSLLGGKAALTLSGVQPEDEAEYYCVLWYSNRWVFGGGTKLTVL

SEQ ID NO: 856 - DNA, 1479 bp, Artificial Sequence
  MET-4 LH x I2C HL
gacatccagatgacccagagccccagcagcgtgtctgccagcgtgggcgacagagtgaccatcacatgtagagctagccagggcatcaacacctggctggcctggtatcagcagaagcccggcaaggcccccaagctgctgatctacgccgcttcctccctgaaatctggcgtgcccagcagattcagcggcagcggaagcggagccgacttcaccctgaccatcagcagcctgcagcccgaggacttcgccacctactactgccagcaggccaacagcttccccctgaccttcggcggagggaccaaggtggagatcaagggtggtggtggttctggcggcggcggctccggtggtggtggttctcaggtgcagctggtgcagagcggcgctgaggtgaagaagccaggcgccagcgtcaaggtgtcctgcgaggccagcggctacaccttcaccagctacggcttcagctgggtgcggcaggctcctggacagggactggaatggatgggctggatcagcgccagcaacggcaacacctactacgcccagaagctgcagggccgcgtcaccatgaccaccgacaccagcaccagcagcgcctacatggagctgagaagcctgagatccgacgacaccgccgtgtactactgcgccagggtgtacgccgactacgctgactactggggccagggcaccctggtgacagtgtcttccggaggtggtggatccgaggtgcagctggtcgagtctggaggaggattggtgcagcctggagggtcattgaaactctcatgtgcagcctctggattcaccttcaataagtacgccatgaactgggtccgccaggctccaggaaagggtttggaatgggttgctcgcataagaagtaaatataataattatgcaacatattatgccgattcagtgaaagacaggttcaccatctccagagatgattcaaaaaacactgcctatctacaaatgaacaacttgaaaactgaggacactgccgtgtactactgtgtgagacatgggaacttcggtaatagctacatatcctactgggcttactggggccaagggactctggtcaccgtctcctcaggtggtggtggttctggcggcggcggctccggtggtggtggttctcagactgttgtgactcaggaaccttcactcaccgtatcacctggtggaacagtcacactcacttgtggctcctcgactggggctgttacatctggcaactacccaaactgggtccaacaaaaaccaggtcaggcaccccgtggtctaataggtgggactaagttcctcgcccccggtactcctgccagattctcaggctccctgcttggaggcaaggctgccctcaccctctcaggggtacagccagaggatgaggcagaatattactgtgttctatggtacagcaaccgctgggtgttcggtggaggaaccaaactgactgtccta

SEQ ID NO: 857 - protein, 109 aa, Artificial Sequence
  MET-5 L
EIVLTQSPGTLSLSPGERATLSCRASQSVSNNYLAWYQQKPGQAPRLLIFGASSRATGIPDRFSGSGSGTDFTLTISRLEPEDFAVYYCQQYDISPMYSFGQGTKLEMK

SEQ ID NO: 858 - protein, 12 aa, Artificial Sequence
  MET-5 L-CDR1
RASQSVSNNYLA

SEQ ID NO: 859 - protein, 7 aa, Artificial Sequence
  MET-5 L-CDR2
GASSRAT

SEQ ID NO: 860 - protein, 10 aa, Artificial Sequence
  MET-5 L-CDR3
QQYDISPMYS

SEQ ID NO: 861 - DNA, 327 bp, Artificial Sequence
  MET-5 L
gagatcgtgctgacccagagcccaggcaccctgagcctgagcccaggcgagagagccaccctgagctgcagagccagccagagcgtgtccaacaactatctggcttggtatcagcagaaaccaggacaggctcccagactgctgatcttcggcgccagctctagagccaccggcatccccgacagattcagtggtagcggctccggcacagacttcaccctgaccatttccagactggaacccgaggacttcgccgtgtactactgccagcagtacgacatcagccccatgtacagcttcggccagggcaccaagctggagatgaag

SEQ ID NO: 862 - protein, 135 aa, Artificial Sequence
  MET-5 H
QVQLQESGPGLVKPSQTLSLTCTVSGGSISSGGYYWSWIRQHPGKGLEWIGYIYYSGSTYYNPSLKSRVTISVDTSKNQFSLKLSSVTAADTAVYYCARDGPLGYCSSTSCPVTGEYYYYGMDVWGQGTTVTVSS

SEQ ID NO: 863 - protein, 7 aa, Artificial Sequence
  MET-5 H-CDR1
SGGYYWS

SEQ ID NO: 864 - protein, 16 aa, Artificial Sequence
  MET-5 H-CDR2
YIYYSGSTYYNPSLKS

SEQ ID NO: 865 - protein, 25 aa, Artificial Sequence
  MET-5 H-CDR3
DGPLGYCSSTSCPVTGEYYYYGMDV

SEQ ID NO: 866 - DNA, 405 bp, Artificial Sequence
  MET-5 H
caggtgcagctgcaggagagcgggcctggactggtgaagcccagccagaccctgtctctgacctgcaccgtgtccggcggcagcatcagcagcggcggctactactggtcctggatcaggcagcacccaggcaagggcctggagtggatcggctacatctactattctggatccacctactacaaccccagcctgaagtccagagtgaccatctccgtggacaccagcaagaaccagttcagcctgaagctgtccagcgtgacagccgccgacaccgccgtgtattattgcgccagggacggcccactgggatattgttcctccacatcctgcccagtgaccggcgagtactactactacggcatggacgtgtggggacagggcaccaccgtgaccgtgtcttcc

SEQ ID NO: 867 - protein, 259 aa, Artificial Sequence
  MET-5 HL
QVQLQESGPGLVKPSQTLSLTCTVSGGSISSGGYYWSWIRQHPGKGLEWIGYIYYSGSTYYNPSLKSRVTISVDTSKNQFSLKLSSVTAADTAVYYCARDGPLGYCSSTSCPVTGEYYYYGMDVWGQGTTVTVSSGGGGSGGGGSGGGGSEIVLTQSPGTLSLSPGERATLSCRASQSVSNNYLAWYQQKPGQAPRLLIFGASSRATGIPDRFSGSGSGTDFTLTISRLEPEDFAVYYCQQYDISPMYSFGQGTKLEMK

SEQ ID NO: 868 - DNA, 777 bp, Artificial Sequence
  MET-5 HL
caggtgcagctgcaggagagcgggcctggactggtgaagcccagccagaccctgtctctgacctgcaccgtgtccggcggcagcatcagcagcggcggctactactggtcctggatcaggcagcacccaggcaagggcctggagtggatcggctacatctactattctggatccacctactacaaccccagcctgaagtccagagtgaccatctccgtggacaccagcaagaaccagttcagcctgaagctgtccagcgtgacagccgccgacaccgccgtgtattattgcgccagggacggcccactgggatattgttcctccacatcctgcccagtgaccggcgagtactactactacggcatggacgtgtggggacagggcaccaccgtgaccgtgtcttccggtggtggtggttctggcggcggcggctccggtggtggtggttctgagatcgtgctgacccagagcccaggcaccctgagcctgagcccaggcgagagagccaccctgagctgcagagccagccagagcgtgtccaacaactatctggcttggtatcagcagaaaccaggacaggctcccagactgctgatcttcggcgccagctctagagccaccggcatccccgacagattcagtggtagcggctccggcacagacttcaccctgaccatttccagactggaacccgaggacttcgccgtgtactactgccagcagtacgacatcagccccatgtacagcttcggccagggcaccaagctggagatgaag

SEQ ID NO: 869 - protein, 259 aa, Artificial Sequence
  MET-5 LH
EIVLTQSPGTLSLSPGERATLSCRASQSVSNNYLAWYQQKPGQAPRLLIFGASSRATGIPDRFSGSGSGTDFTLTISRLEPEDFAVYYCQQYDISPMYSFGQGTKLEMKGGGGSGGGGSGGGGSQVQLQESGPGLVKPSQTLSLTCTVSGGSISSGGYYWSWIRQHPGKGLEWIGYIYYSGSTYYNPSLKSRVTISVDTSKNQFSLKLSSVTAADTAVYYCARDGPLGYCSSTSCPVTGEYYYYGMDVWGQGTTVTVSS

SEQ ID NO: 870 - DNA, 777 bp, Artificial Sequence
  MET-5 LH
gagatcgtgctgacccagagcccaggcaccctgagcctgagcccaggcgagagagccaccctgagctgcagagccagccagagcgtgtccaacaactatctggcttggtatcagcagaaaccaggacaggctcccagactgctgatcttcggcgccagctctagagccaccggcatccccgacagattcagtggtagcggctccggcacagacttcaccctgaccatttccagactggaacccgaggacttcgccgtgtactactgccagcagtacgacatcagccccatgtacagcttcggccagggcaccaagctggagatgaagggtggtggtggttctggcggcggcggctccggtggtggtggttctcaggtgcagctgcaggagagcgggcctggactggtgaagcccagccagaccctgtctctgacctgcaccgtgtccggcggcagcatcagcagcggcggctactactggtcctggatcaggcagcacccaggcaagggcctggagtggatcggctacatctactattctggatccacctactacaaccccagcctgaagtccagagtgaccatctccgtggacaccagcaagaaccagttcagcctgaagctgtccagcgtgacagccgccgacaccgccgtgtattattgcgccagggacggcccactgggatattgttcctccacatcctgcccagtgaccggcgagtactactactacggcatggacgtgtggggacagggcaccaccgtgaccgtgtcttcc

SEQ ID NO: 871 - protein, 514 aa, Artificial Sequence
  MET-5 HL x I2C HL
QVQLQESGPGLVKPSQTLSLTCTVSGGSISSGGYYWSWIRQHPGKGLEWIGYIYYSGSTYYNPSLKSRVTISVDTSKNQFSLKLSSVTAADTAVYYCARDGPLGYCSSTSCPVTGEYYYYGMDVWGQGTTVTVSSGGGGSGGGGSGGGGSEIVLTQSPGTLSLSPGERATLSCRASQSVSNNYLAWYQQKPGQAPRLLIFGASSRATGIPDRFSGSGSGTDFTLTISRLEPEDFAVYYCQQYDISPMYSFGQGTKLEMKSGGGGSEVQLVESGGGLVQPGGSLKLSCAASGFTFNKYAMNWVRQAPGKGLEWVARIRSKYNNYATYYADSVKDRFTISRDDSKNTAYLQMNNLKTEDTAVYYCVRHGNFGNSYISYWAYWGQGTLVTVSSGGGGSGGGGSGGGGSQTVVTQEPSLTVSPGGTVTLTCGSSTGAVTSGNYPNWVQQKPGQAPRGLIGGTKFLAPGTPARFSGSLLGGKAALTLSGVQPEDEAEYYCVLWYSNRWVFGGGTKLTVL

SEQ ID NO: 872 - DNA, 1542 bp, Artificial Sequence
  MET-5 HL x I2C HL
caggtgcagctgcaggagagcgggcctggactggtgaagcccagccagaccctgtctctgacctgcaccgtgtccggcggcagcatcagcagcggcggctactactggtcctggatcaggcagcacccaggcaagggcctggagtggatcggctacatctactattctggatccacctactacaaccccagcctgaagtccagagtgaccatctccgtggacaccagcaagaaccagttcagcctgaagctgtccagcgtgacagccgccgacaccgccgtgtattattgcgccagggacggcccactgggatattgttcctccacatcctgcccagtgaccggcgagtactactactacggcatggacgtgtggggacagggcaccaccgtgaccgtgtcttccggtggtggtggttctggcggcggcggctccggtggtggtggttctgagatcgtgctgacccagagcccaggcaccctgagcctgagcccaggcgagagagccaccctgagctgcagagccagccagagcgtgtccaacaactatctggcttggtatcagcagaaaccaggacaggctcccagactgctgatcttcggcgccagctctagagccaccggcatccccgacagattcagtggtagcggctccggcacagacttcaccctgaccatttccagactggaacccgaggacttcgccgtgtactactgccagcagtacgacatcagccccatgtacagcttcggccagggcaccaagctggagatgaagtccggaggtggtggatccgaggtgcagctggtcgagtctggaggaggattggtgcagcctggagggtcattgaaactctcatgtgcagcctctggattcaccttcaataagtacgccatgaactgggtccgccaggctccaggaaagggtttggaatgggttgctcgcataagaagtaaatataataattatgcaacatattatgccgattcagtgaaagacaggttcaccatctccagagatgattcaaaaaacactgcctatctacaaatgaacaacttgaaaactgaggacactgccgtgtactactgtgtgagacatgggaacttcggtaatagctacatatcctactgggcttactggggccaagggactctggtcaccgtctcctcaggtggtggtggttctggcggcggcggctccggtggtggtggttctcagactgttgtgactcaggaaccttcactcaccgtatcacctggtggaacagtcacactcacttgtggctcctcgactggggctgttacatctggcaactacccaaactgggtccaacaaaaaccaggtcaggcaccccgtggtctaataggtgggactaagttcctcgcccccggtactcctgccagattctcaggctccctgcttggaggcaaggctgccctcaccctctcaggggtacagccagaggatgaggcagaatattactgtgttctatggtacagcaaccgctgggtgttcggtggaggaaccaaactgactgtccta

SEQ ID NO: 873 - protein, 513 aa, Artificial Sequence [sequence omitted]

SEQ ID NO: 874 - DNA, 1539 bp, Artificial Sequence
  MET-5 LH x I2C HL
gagatcgtgctgacccagagcccaggcaccctgagcctgagcccaggcgagagagccaccctgagctgcagagccagccagagcgtgtccaacaactatctggcttggtatcagcagaaaccaggacaggctcccagactgctgatcttcggcgccagctctagagccaccggcatccccgacagattcagtggtagcggctccggcacagacttcaccctgaccatttccagactggaacccgaggacttcgccgtgtactactgccagcagtacgacatcagccccatgtacagcttcggccagggcaccaagctggagatgaagggtggtggtggttctggcggcggcggctccggtggtggtggttctcaggtgcagctgcaggagagcgggcctggactggtgaagcccagccagaccctgtctctgacctgcaccgtgtccggcggcagcatcagcagcggcggctactactggtcctggatcaggcagcacccaggcaagggcctggagtggatcggctacatctactattctggatccacctactacaaccccagcctgaagtccagagtgaccatctccgtggacaccagcaagaaccagttcagcctgaagctgtccagcgtgacagccgccgacaccgccgtgtattattgcgccagggacggcccactgggatattgttcctccacatcctgcccagtgaccggcgagtactactactacggcatggacgtgtggggacagggcaccaccgtgaccgtgtcttccggaggtggtggatccgaggtgcagctggtcgagtctggaggaggattggtgcagcctggagggtcattgaaactctcatgtgcagcctctggattcaccttcaataagtacgccatgaactgggtccgccaggctccaggaaagggtttggaatgggttgctcgcataagaagtaaatataataattatgcaacatattatgccgattcagtgaaagacaggttcaccatctccagagatgattcaaaaaacactgcctatctacaaatgaacaacttgaaaactgaggacactgccgtgtactactgtgtgagacatgggaacttcggtaatagctacatatcctactgggcttactggggccaagggactctggtcaccgtctcctcaggtggtggtggttctggcggcggcggctccggtggtggtggttctcagactgttgtgactcaggaaccttcactcaccgtatcacctggtggaacagtcacactcacttgtggctcctcgactggggctgttacatctggcaactacccaaactgggtccaacaaaaaccaggtcaggcaccccgtggtctaataggtgggactaagttcctcgcccccggtactcctgccagattctcaggctccctgcttggaggcaaggctgccctcaccctctcaggggtacagccagaggatgaggcagaatattactgtgttctatggtacagcaaccgctgggtgttcggtggaggaaccaaactgactgtccta

SEQ ID NO: 875 - protein, 107 aa, Artificial Sequence
  MET-6 L
DIQMTQSPSSVSASVGDRVTITCRASQGISSWLAWYQQKPGKAPKLLIYAASSLQSGVPSRFSGSGSGTDFTLTISSLQSEDFATYYCQQANSFPITFGPGTKVEIK

SEQ ID NO: 876 - protein, 11 aa, Artificial Sequence
  MET-6 L-CDR1
RASQGISSWLA

SEQ ID NO: 877 - protein, 7 aa, Artificial Sequence
  MET-6 L-CDR2
AASSLQS

SEQ ID NO: 878 - protein, 9 aa, Artificial Sequence
  MET-6 L-CDR3
QQANSFPIT

SEQ ID NO: 879 - DNA, 321 bp, Artificial Sequence
  MET-6 L
gacatccagatgacccagagccccagcagcgtgtctgccagcgtgggcgacagagtgaccatcacctgcagagcttcccagggcatctctagctggctggcctggtatcagcagaagcccggcaaggcccccaagctcctgatctatgctgcttccagcctgcagagcggcgtgcccagcagattcagcggcagcggctccggcacagacttcaccctgaccatcagctccctgcagtccgaggacttcgccacctactactgccagcaggccaacagcttccccatcaccttcggcccaggcaccaaggtggagatcaag

SEQ ID NO: 880 - protein, 118 aa, Artificial Sequence
  MET-6 H
QLQLQESGPGLVKPSETLSLTCTVSGGSISSSSYYGGWIRQPPGKGLDWIGSIYYSGNTYYNPSLKSRVTISVDTSKNQFSLKLSSVTAADTAVYYCARHSWDYFDYWDQGTLVTVSS

SEQ ID NO: 881 - protein, 7 aa, Artificial Sequence
  MET-6 H-CDR1
SSSYYGG

SEQ ID NO: 882 - protein, 16 aa, Artificial Sequence
  MET-6 H-CDR2
SIYYSGNTYYNPSLKS

SEQ ID NO: 883 - protein, 8 aa, Artificial Sequence
  MET-6 H-CDR3
HSWDYFDY

SEQ ID NO: 884 - DNA, 354 bp, Artificial Sequence
  MET-6 H
cagctccagctccaggagagcgggcctggactggtgaagcccagcgagacactgagcctgacctgcaccgtgtccggcggcagcatcagcagcagcagctactacggcggctggatcagacagccacccggcaaaggactggattggatcggatccatctattatagtggaaacacctactacaaccccagcctgaagtcccgcgtgaccatctccgtggacaccagcaagaaccagttcagcctgaagctgtccagcgtgacagccgccgacaccgccgtgtactactgcgccaggcacagctgggactacttcgactactgggaccagggcaccctggtgaccgtgtcttcc

SEQ ID NO: 885 - protein, 240 aa, Artificial Sequence
  MET-6 HL
QLQLQESGPGLVKPSETLSLTCTVSGGSISSSSYYGGWIRQPPGKGLDWIGSIYYSGNTYYNPSLKSRVTISVDTSKNQFSLKLSSVTAADTAVYYCARHSWDYFDYWDQGTLVTVSSGGGGSGGGGSGGGGSDIQMTQSPSSVSASVGDRVTITCRASQGISSWLAWYQQKPGKAPKLLIYAASSLQSGVPSRFSGSGSGTDFTLTISSLQSEDFATYYCQQANSFPITFGPGTKVEIK

SEQ ID NO: 886 - DNA, 720 bp, Artificial Sequence
  MET-6 HL
cagctccagctccaggagagcgggcctggactggtgaagcccagcgagacactgagcctgacctgcaccgtgtccggcggcagcatcagcagcagcagctactacggcggctggatcagacagccacccggcaaaggactggattggatcggatccatctattatagtggaaacacctactacaaccccagcctgaagtcccgcgtgaccatctccgtggacaccagcaagaaccagttcagcctgaagctgtccagcgtgacagccgccgacaccgccgtgtactactgcgccaggcacagctgggactacttcgactactgggaccagggcaccctggtgaccgtgtcttccggtggtggtggttctggcggcggcggctccggtggtggtggttctgacatccagatgacccagagccccagcagcgtgtctgccagcgtgggcgacagagtgaccatcacctgcagagcttcccagggcatctctagctggctggcctggtatcagcagaagcccggcaaggcccccaagctcctgatctatgctgcttccagcctgcagagcggcgtgcccagcagattcagcggcagcggctccggcacagacttcaccctgaccatcagctccctgcagtccgaggacttcgccacctactactgccagcaggccaacagcttccccatcaccttcggcccaggcaccaaggtggagatcaag

SEQ ID NO: 887 - protein, 240 aa, Artificial Sequence
  MET-6 LH
DIQMTQSPSSVSASVGDRVTITCRASQGISSWLAWYQQKPGKAPKLLIYAASSLQSGVPSRFSGSGSGTDFTLTISSLQSEDFATYYCQQANSFPITFGPGTKVEIKGGGGSGGGGSGGGGSQLQLQESGPGLVKPSETLSLTCTVSGGSISSSSYYGGWIRQPPGKGLDWIGSIYYSGNTYYNPSLKSRVTISVDTSKNQFSLKLSSVTAADTAVYYCARHSWDYFDYWDQGTLVTVSS

SEQ ID NO: 888 - DNA, 720 bp, Artificial Sequence
  MET-6 LH
gacatccagatgacccagagccccagcagcgtgtctgccagcgtgggcgacagagtgaccatcacctgcagagcttcccagggcatctctagctggctggcctggtatcagcagaagcccggcaaggcccccaagctcctgatctatgctgcttccagcctgcagagcggcgtgcccagcagattcagcggcagcggctccggcacagacttcaccctgaccatcagctccctgcagtccgaggacttcgccacctactactgccagcaggccaacagcttccccatcaccttcggcccaggcaccaaggtggagatcaagggtggtggtggttctggcggcggcggctccggtggtggtggttctcagctccagctccaggagagcgggcctggactggtgaagcccagcgagacactgagcctgacctgcaccgtgtccggcggcagcatcagcagcagcagctactacggcggctggatcagacagccacccggcaaaggactggattggatcggatccatctattatagtggaaacacctactacaaccccagcctgaagtcccgcgtgaccatctccgtggacaccagcaagaaccagttcagcctgaagctgtccagcgtgacagccgccgacaccgccgtgtactactgcgccaggcacagctgggactacttcgactactgggaccagggcaccctggtgaccgtgtcttcc

SEQ ID NO: 889 - protein, 495 aa, Artificial Sequence
  MET-6 HL x I2C HL
QLQLQESGPGLVKPSETLSLTCTVSGGSISSSSYYGGWIRQPPGKGLDWIGSIYYSGNTYYNPSLKSRVTISVDTSKNQFSLKLSSVTAADTAVYYCARHSWDYFDYWDQGTLVTVSSGGGGSGGGGSGGGGSDIQMTQSPSSVSASVGDRVTITCRASQGISSWLAWYQQKPGKAPKLLIYAASSLQSGVPSRFSGSGSGTDFTLTISSLQSEDFATYYCQQANSFPITFGPGTKVEIKSGGGGSEVQLVESGGGLVQPGGSLKLSCAASGFTFNKYAMNWVRQAPGKGLEWVARIRSKYNNYATYYADSVKDRFTISRDDSKNTAYLQMNNLKTEDTAVYYCVRHGNFGNSYISYWAYWGQGTLVTVSSGGGGSGGGGSGGGGSQTVVTQEPSLTVSPGGTVTLTCGSSTGAVTSGNYPNWVQQKPGQAPRGLIGGTKFLAPGTPARFSGSLLGGKAALTLSGVQPEDEAEYYCVLWYSNRWVFGGGTKLTVL

SEQ ID NO: 890 - DNA, 1485 bp, Artificial Sequence
  MET-6 HL x I2C HL
cagctccagctccaggagagcgggcctggactggtgaagcccagcgagacactgagcctgacctgcaccgtgtccggcggcagcatcagcagcagcagctactacggcggctggatcagacagccacccggcaaaggactggattggatcggatccatctattatagtggaaacacctactacaaccccagcctgaagtcccgcgtgaccatctccgtggacaccagcaagaaccagttcagcctgaagctgtccagcgtgacagccgccgacaccgccgtgtactactgcgccaggcacagctgggactacttcgactactgggaccagggcaccctggtgaccgtgtcttccggtggtggtggttctggcggcggcggctccggtggtggtggttctgacatccagatgacccagagccccagcagcgtgtctgccagcgtgggcgacagagtgaccatcacctgcagagcttcccagggcatctctagctggctggcctggtatcagcagaagcccggcaaggcccccaagctcctgatctatgctgcttccagcctgcagagcggcgtgcccagcagattcagcggcagcggctccggcacagacttcaccctgaccatcagctccctgcagtccgaggacttcgccacctactactgccagcaggccaacagcttccccatcaccttcggcccaggcaccaaggtggagatcaagtccggaggtggtggatccgaggtgcagctggtcgagtctggaggaggattggtgcagcctggagggtcattgaaactctcatgtgcagcctctggattcaccttcaataagtacgccatgaactgggtccgccaggctccaggaaagggtttggaatgggttgctcgcataagaagtaaatataataattatgcaacatattatgccgattcagtgaaagacaggttcaccatctccagagatgattcaaaaaacactgcctatctacaaatgaacaacttgaaaactgaggacactgccgtgtactactgtgtgagacatgggaacttcggtaatagctacatatcctactgggcttactggggccaagggactctggtcaccgtctcctcaggtggtggtggttctggcggcggcggctccggtggtggtggttctcagactgttgtgactcaggaaccttcactcaccgtatcacctggtggaacagtcacactcacttgtggctcctcgactggggctgttacatctggcaactacccaaactgggtccaacaaaaaccaggtcaggcaccccgtggtctaataggtgggactaagttcctcgcccccggtactcctgccagattctcaggctccctgcttggaggcaaggctgccctcaccctctcaggggtacagccagaggatgaggcagaatattactgtgttctatggtacagcaaccgctgggtgttcggtggaggaaccaaactgactgtccta

SEQ ID NO: 891 - protein, 494 aa, Artificial Sequence
  MET-6 LH x I2C HL
DIQMTQSPSSVSASVGDRVTITCRASQGISSWLAWYQQKPGKAPKLLIYAASSLQSGVPSRFSGSGSGTDFTLTISSLQSEDFATYYCQQANSFPITFGPGTKVEIKGGGGSGGGGSGGGGSQLQLQESGPGLVKPSETLSLTCTVSGGSISSSSYYGGWIRQPPGKGLDWIGSIYYSGNTYYNPSLKSRVTISVDTSKNQFSLKLSSVTAADTAVYYCARHSWDYFDYWDQGTLVTVSSGGGGSEVQLVESGGGLVQPGGSLKLSCAASGFTFNKYAMNWVRQAPGKGLEWVARIRSKYNNYATYYADSVKDRFTISRDDSKNTAYLQMNNLKTEDTAVYYCVRHGNFGNSYISYWAYWGQGTLVTVSSGGGGSGGGGSGGGGSQTVVTQEPSLTVSPGGTVTLTCGSSTGAVTSGNYPNWVQQKPGQAPRGLIGGTKFLAPGTPARFSGSLLGGKAALTLSGVQPEDEAEYYCVLWYSNRWVFGGGTKLTVL

SEQ ID NO: 892 - DNA, 1482 bp, Artificial Sequence
  MET-6 LH x I2C HL
gacatccagatgacccagagccccagcagcgtgtctgccagcgtgggcgacagagtgaccatcacctgcagagcttcccagggcatctctagctggctggcctggtatcagcagaagcccggcaaggcccccaagctcctgatctatgctgcttccagcctgcagagcggcgtgcccagcagattcagcggcagcggctccggcacagacttcaccctgaccatcagctccctgcagtccgaggacttcgccacctactactgccagcaggccaacagcttccccatcaccttcggcccaggcaccaaggtggagatcaagggtggtggtggttctggcggcggcggctccggtggtggtggttctcagctccagctccaggagagcgggcctggactggtgaagcccagcgagacactgagcctgacctgcaccgtgtccggcggcagcatcagcagcagcagctactacggcggctggatcagacagccacccggcaaaggactggattggatcggatccatctattatagtggaaacacctactacaaccccagcctgaagtcccgcgtgaccatctccgtggacaccagcaagaaccagttcagcctgaagctgtccagcgtgacagccgccgacaccgccgtgtactactgcgccaggcacagctgggactacttcgactactgggaccagggcaccctggtgaccgtgtcttccggaggtggtggatccgaggtgcagctggtcgagtctggaggaggattggtgcagcctggagggtcattgaaactctcatgtgcagcctctggattcaccttcaataagtacgccatgaactgggtccgccaggctccaggaaagggtttggaatgggttgctcgcataagaagtaaatataataattatgcaacatattatgccgattcagtgaaagacaggttcaccatctccagagatgattcaaaaaacactgcctatctacaaatgaacaacttgaaaactgaggacactgccgtgtactactgtgtgagacatgggaacttcggtaatagctacatatcctactgggcttactggggccaagggactctggtcaccgtctcctcaggtggtggtggttctggcggcggcggctccggtggtggtggttctcagactgttgtgactcaggaaccttcactcaccgtatcacctggtggaacagtcacactcacttgtggctcctcgactggggctgttacatctggcaactacccaaactgggtccaacaaaaaccaggtcaggcaccccgtggtctaataggtgggactaagttcctcgcccccggtactcctgccagattctcaggctccctgcttggaggcaaggctgccctcaccctctcaggggtacagccagaggatgaggcagaatattactgtgttctatggtacagcaaccgctgggtgttcggtggaggaaccaaactgactgtccta

SEQ ID NO: 893 - protein, 107 aa, Artificial Sequence
  MET-7 L
DIQMTQSPSSVSASVGDRVIITCRASQGISSWLAWYQQKPGKAPKLLIYAASSLKSGVPSRFSGSGSGTDFTVTISSLQPEDFATYYCQQSNSLPWTFGQGTKVEIK

SEQ ID NO: 894 - protein, 11 aa, Artificial Sequence
  MET-7 L-CDR1
RASQGISSWLA

SEQ ID NO: 895 - protein, 7 aa, Artificial Sequence
  MET-7 L-CDR2
AASSLKS

SEQ ID NO: 896 - protein, 9 aa, Artificial Sequence
  MET-7 L-CDR3
QQSNSLPWT

SEQ ID NO: 897 - DNA, 321 bp, Artificial Sequence
  MET-7 L
gacatccagatgacccagagccccagcagcgtgtctgccagcgtgggcgacagagtgatcatcacctgcagagcttcccagggcatctctagctggctggcctggtatcagcagaagcccggcaaggcccccaagctgctcatctatgctgcttccagcctgaagtccggcgtgcccagcagattcagcggcagcggctccggcacagacttcaccgtgaccatcagcagcctgcagcccgaggacttcgccacctactactgccagcagagcaacagcctgccctggaccttcggccagggcaccaaggtggagatcaag

SEQ ID NO: 898 - protein, 117 aa, Artificial Sequence
  MET-7 H
EVQLVESGGGLVQPGGSLRLSCAASGFTFSRYSMNWVRQAPGKGLEWVSYISSRSSTIYYADSVKGRFTMSRDNAKNSLYMQMNSLRDEDTAVYYCGYGDYDYFDYWGQGTLVTVSS

SEQ ID NO: 899 - protein, 5 aa, Artificial Sequence
  MET-7 H-CDR1
RYSMN

SEQ ID NO: 900 - protein, 17 aa, Artificial Sequence
  MET-7 H-CDR2
YISSRSSTIYYADSVKG

SEQ ID NO: 901 - protein, 8 aa, Artificial Sequence
  MET-7 H-CDR3
GDYDYFDY

SEQ ID NO: 902 - DNA, 351 bp, Artificial Sequence
  MET-7 H
gaggtgcagctggtcgagtctggcggaggactggtgcagccaggcggcagcctgagactgtcctgtgctgcttctggattcaccttcagcaggtacagcatgaactgggtccgccaggctcctggtaaaggactggagtgggtctcctacatcagcagcaggtccagcaccatctactacgccgacagcgtgaagggcaggttcaccatgagcagggacaacgccaagaacagcctgtacatgcagatgaacagcctgagggacgaggacaccgccgtgtactactgcggctacggcgactacgactacttcgactactggggccagggaaccctggtgaccgtgtcttcc

SEQ ID NO: 903 - protein, 239 aa, Artificial Sequence
  MET-7 LH
DIQMTQSPSSVSASVGDRVIITCRASQGISSWLAWYQQKPGKAPKLLIYAASSLKSGVPSRFSGSGSGTDFTVTISSLQPEDFATYYCQQSNSLPWTFGQGTKVEIKGGGGSGGGGSGGGGSEVQLVESGGGLVQPGGSLRLSCAASGFTFSRYSMNWVRQAPGKGLEWVSYISSRSSTIYYADSVKGRFTMSRDNAKNSLYMQMNSLRDEDTAVYYCGYGDYDYFDYWGQGTLVTVSS

SEQ ID NO: 904 - DNA, 717 bp, Artificial Sequence
  MET-7 LH
gacatccagatgacccagagccccagcagcgtgtctgccagcgtgggcgacagagtgatcatcacctgcagagcttcccagggcatctctagctggctggcctggtatcagcagaagcccggcaaggcccccaagctgctcatctatgctgcttccagcctgaagtccggcgtgcccagcagattcagcggcagcggctccggcacagacttcaccgtgaccatcagcagcctgcagcccgaggacttcgccacctactactgccagcagagcaacagcctgccctggaccttcggccagggcaccaaggtggagatcaagggtggtggtggttctggcggcggcggctccggtggtggtggttctgaggtgcagctggtcgagtctggcggaggactggtgcagccaggcggcagcctgagactgtcctgtgctgcttctggattcaccttcagcaggtacagcatgaactgggtccgccaggctcctggtaaaggactggagtgggtctcctacatcagcagcaggtccagcaccatctactacgccgacagcgtgaagggcaggttcaccatgagcagggacaacgccaagaacagcctgtacatgcagatgaacagcctgagggacgaggacaccgccgtgtactactgcggctacggcgactacgactacttcgactactggggccagggaaccctggtgaccgtgtcttcc

SEQ ID NO: 905 - protein, 493 aa, Artificial Sequence
  MET-7 LH x I2C HL
DIQMTQSPSSVSASVGDRVIITCRASQGISSWLAWYQQKPGKAPKLLIYAASSLKSGVPSRFSGSGSGTDFTVTISSLQPEDFATYYCQQSNSLPWTFGQGTKVEIKGGGGSGGGGSGGGGSEVQLVESGGGLVQPGGSLRLSCAASGFTFSRYSMNWVRQAPGKGLEWVSYISSRSSTIYYADSVKGRFTMSRDNAKNSLYMQMNSLRDEDTAVYYCGYGDYDYFDYWGQGTLVTVSSGGGGSEVQLVESGGGLVQPGGSLKLSCAASGFTFNKYAMNWVRQAPGKGLEWVARIRSKYNNYATYYADSVKDRFTISRDDSKNTAYLQMNNLKTEDTAVYYCVRHGNFGNSYISYWAYWGQGTLVTVSSGGGGSGGGGSGGGGSQTVVTQEPSLTVSPGGTVTLTCGSSTGAVTSGNYPNWVQQKPGQAPRGLIGGTKFLAPGTPARFSGSLLGGKAALTLSGVQPEDEAEYYCVLWYSNRWVFGGGTKLTVL

SEQ ID NO: 906 - DNA, 1479 bp, Artificial Sequence
  MET-7 LH x I2C HL
gacatccagatgacccagagccccagcagcgtgtctgccagcgtgggcgacagagtgatcatcacctgcagagcttcccagggcatctctagctggctggcctggtatcagcagaagcccggcaaggcccccaagctgctcatctatgctgcttccagcctgaagtccggcgtgcccagcagattcagcggcagcggctccggcacagacttcaccgtgaccatcagcagcctgcagcccgaggacttcgccacctactactgccagcagagcaacagcctgccctggaccttcggccagggcaccaaggtggagatcaagggtggtggtggttctggcggcggcggctccggtggtggtggttctgaggtgcagctggtcgagtctggcggaggactggtgcagccaggcggcagcctgagactgtcctgtgctgcttctggattcaccttcagcaggtacagcatgaactgggtccgccaggctcctggtaaaggactggagtgggtctcctacatcagcagcaggtccagcaccatctactacgccgacagcgtgaagggcaggttcaccatgagcagggacaacgccaagaacagcctgtacatgcagatgaacagcctgagggacgaggacaccgccgtgtactactgcggctacggcgactacgactacttcgactactggggccagggaaccctggtgaccgtgtcttccggaggtggtggatccgaggtgcagctggtcgagtctggaggaggattggtgcagcctggagggtcattgaaactctcatgtgcagcctctggattcaccttcaataagtacgccatgaactgggtccgccaggctccaggaaagggtttggaatgggttgctcgcataagaagtaaatataataattatgcaacatattatgccgattcagtgaaagacaggttcaccatctccagagatgattcaaaaaacactgcctatctacaaatgaacaacttgaaaactgaggacactgccgtgtactactgtgtgagacatgggaacttcggtaatagctacatatcctactgggcttactggggccaagggactctggtcaccgtctcctcaggtggtggtggttctggcggcggcggctccggtggtggtggttctcagactgttgtgactcaggaaccttcactcaccgtatcacctggtggaacagtcacactcacttgtggctcctcgactggggctgttacatctggcaactacccaaactgggtccaacaaaaaccaggtcaggcaccccgtggtctaataggtgggactaagttcctcgcccccggtactcctgccagattctcaggctccctgcttggaggcaaggctgccctcaccctctcaggggtacagccagaggatgaggcagaatattactgtgttctatggtacagcaaccgctgggtgttcggtggaggaaccaaactgactgtccta

SEQ ID NO: 907 - protein, 11 aa, Artificial Sequence
  ENSI L-CDR1
RASQNVGTAVA

SEQ ID NO: 908 - protein, 7 aa, Artificial Sequence
  ENSI L-CDR2
SASNRYT

SEQ ID NO: 909 - protein, 10 aa, Artificial Sequence
  ENSI L-CDR3
QQYTNYPMYT

SEQ ID NO: 910 - protein, 5 aa, Artificial Sequence
  ENSI H-CDR1
DYVIH

SEQ ID NO: 911 - protein, 17 aa, Artificial Sequence
  ENSI H-CDR2
YINPYDDDTTYNQKFKG

SEQ ID NO: 912 - protein, 15 aa, Artificial Sequence
  ENSI H-CDR3
RGNSYDGYFDYSMDY

SEQ ID NO: 913 - DNA, 2298 bp, Artificial Sequence
  Human endosialin
atgctgctgcgcctgttgctggcctgggcggccgcagggcccacactgggccaggacccctgggctgctgagccccgtgccgcctgcggccccagcagctgctacgctctcttcccacggcgccgcaccttcctggaggcctggcgggcctgccgcgagctggggggcgacctggccactcctcggacccccgaggaggcccagcgtgtggacagcctggtgggtgcgggcccagccagccggctgctgtggatcgggctgcagcggcaggcccggcaatgccagctgcagcgcccactgcgcggcttcacgtggaccacaggggaccaggacacggctttcaccaactgggcccagccagcctctggaggcccctgcccggcccagcgctgtgtggccctggaggcaagtggcgagcaccgctggctggagggctcgtgcacgctggctgtcgacggctacctgtgccagtttggcttcgagggcgcctgcccggcgctgcaagatgaggcgggccaggccggcccagccgtgtataccacgcccttccacctggtctccacagagtttgagtggctgcccttcggctctgtggccgctgtgcagtgccaggctggcaggggagcctctctgctctgcgtgaagcagcctgagggaggtgtgggctggtcacgggctgggcccctgtgcctggggactggctgcagccctgacaacgggggctgcgaacacgaatgtgtggaggaggtggatggtcacgtgtcctgccgctgcactgagggcttccggctggcagcagacgggcgcagttgcgaggacccctgtgcccaggctccgtgcgagcagcagtgtgagcccggtgggccacaaggctacagctgccactgtcgcctgggtttccggccagcggaggatgatccgcaccgctgtgtggacacagatgagtgccagattgccggtgtgtgccagcagatgtgtgtcaactacgttggtggcttcgagtgttattgtagcgagggacatgagctggaggctgatggcatcagctgcagccctgcaggggccatgggtgcccaggcttcccaggacctcggagatgagttgctggatgacggggaggatgaggaagatgaagacgaggcctggaaggccttcaacggtggctggacggagatgcctgggatcctgtggatggagcctacgcagccgcctgactttgccctggcctatagaccgagcttcccagaggacagagagccacagataccctacccggagcccacctggccacccccgctcagtgcccccagggtcccctaccactcctcagtgctctccgtcacccggcctgtggtggtctctgccacgcatcccacactgccttctgcccaccagcctcctgtgatccctgccacacacccagctttgtcccgtgaccaccagatccccgtgatcgcagccaactatccagatctgccttctgcctaccaacccggtattctctctgtctctcattcagcacagcctcctgcccaccagccccctatgatctcaaccaaatatccggagctcttccctgcccaccagtcccccatgtttccagacacccgggtcgctggcacccagaccaccactcatttgcctggaatcccacctaaccatgcccctctggtcaccaccctcggtgcccagctaccccctcaagccccagatgcccttgtcctcagaacccaggccacccagcttcccattatcccaactgcccagccctctctgaccaccacctccaggtcccctgtgtctcctgcccatcaaatctctgtgcctgctgccacccagcccgcagccctccccaccctcctgccctctcagagccccactaaccagacctcacccatcagccctacacatccccattccaaagccccccaaatcccaagggaagatggccccagtcccaagttggccctgtggctgccctcaccagctcccacagcagccccaacagccctgggggaggctggtcttgccgagcacagccagagggatgaccggtggctgctggtggcactcctggtgccaacgtgtgtctttttggtggtcctgcttgcactgggcatcgtgtactgcacccgctgtggcccccatgcacccaacaagcgcatcactgactgctatcgctgggtcatccatgctgggagcaagagcccaacagaacccatgccccccaggggcagcctcacaggggtgcagacctgcagaaccagcgtggactacaaagatgatgacgataagtga

SEQ ID NO: 914 - protein, 765 aa, Artificial Sequence
  Human endosialin
MLLRLLLAWAAAGPTLGQDPWAAEPRAACGPSSCYALFPRRRTFLEAWRACRELGGDLATPRTPEEAQRVDSLVGAGPASRLLWIGLQRQARQCQLQRPLRGFTWTTGDQDTAFTNWAQPASGGPCPAQRCVALEASGEHRWLEGSCTLAVDGYLCQFGFEGACPALQDEAGQAGPAVYTTPFHLVSTEFEWLPFGSVAAVQCQAGRGASLLCVKQPEGGVGWSRAGPLCLGTGCSPDNGGCEHECVEEVDGHVSCRCTEGFRLAADGRSCEDPCAQAPCEQQCEPGGPQGYSCHCRLGFRPAEDDPHRCVDTDECQIAGVCQQMCVNYVGGFECYCSEGHELEADGISCSPAGAMGAQASQDLGDELLDDGEDEEDEDEAWKAFNGGWTEMPGILWMEPTQPPDFALAYRPSFPEDREPQIPYPEPTWPPPLSAPRVPYHSSVLSVTRPVVVSATHPTLPSAHQPPVIPATHPALSRDHQIPVIAANYPDLPSAYQPGILSVSHSAQPPAHQPPMISTKYPELFPAHQSPMFPDTRVAGTQTTTHLPGIPPNHAPLVTTLGAQLPPQAPDALVLRTQATQLPIIPTAQPSLTTTSRSPVSPAHQISVPAATQPAALPTLLPSQSPTNQTSPISPTHPHSKAPQIPREDGPSPKLALWLPSPAPTAAPTALGEAGLAEHSQRDDRWLLVALLVPTCVFLVVLLALGIVYCTRCGPHAPNKRITDCYRWVIHAGSKSPTEPMPPRGSLTGVQTCRTSVDYKDDDDK

SEQ ID NO: 915 - DNA, 2298 bp, Artificial Sequence
  Macaque endosialin
atgctgctgcgcctgttgctggcctgggcggccgcagggcccacactgggccaggacccctgggctgctgagccccgctccgcctgcggccccagcagctgctacgctctctttccacggcgccgcacctttctggaggcctggcgggcctgccgcgagctggggggcgacctggccactcctcggacccccgaggaggcccagcgtgtggacaacctggtgggtgcaggcccggccagccggctgctgtggatcggcctgcagcggcaggcccggcaatgccagctgcagcgcccactgcgaggcttcacgtggaccacaggggaccaggacacggctttcaccaactgggcccagccagccactggaggcccctgcccggcccagcgctgtgtggccctggaggcgagtggcgagcaccgctggctggagggctcatgcacgctggctgtcgacggctacttgtgccagtttggcttcgagggtgcctgcccagcgctgcaagacgaagcgggccaggccggcccagccgtctataccacgcccttccacctggtctccacagagtttgagtggctacccttcggctctgtggccgctgtgcagtgccaggctggcaggggagcctctctgctctgcgtgaagcagcccgagggaggtgtgggctggtcacgggcagggcccctgtgcctgggggctggctgcagccctgacaacgggggctgcgaacacgaatgtgtggaggaggtggatggtcacgtgtcctgccgctgcactgagggcttccggctggcagcagacgggcgcagttgcgaggatccctgtgcccaggctccatgcgagcagcagtgtgagcccggtgggccacaaggctacagctgccactgtcgcctgggtttccgacctgcagaggatgatccgcaccgctgtgtggacacagatgagtgccagattgccggtgtgtgccagcagatgtgtgtcaactacgttggtggcttcgagtgttattgtagtgagggtcatgagctggaggctgatggcatcagctgcagccctgcaggggccatgggtgcccgggcttcccaggacctcggagatgagttgctggatgatggggaggatgaggaagatgaagacgaggcctgggaggcctttggcggtggctggacggagatgcctgggatcctgtggatggagcctactcagccgcctgactttgccctggcctatagaccgagcttcccagaggacagagagccacagataccctacccggagcccacctggccgcccccgctcagtgcccccagggtcccctaccactcctcagtgctctccgtcacccggcctgtggtggtctctgccacgcgccccacactgccttccgcccaccagcctcctgtgatccctgccacacacccagctttgtcccgtgaccaccagatccccgtgatcgcagccaactatccagatctgccttctgcctaccaacccggtattctctctgtctctcatccagcacagccccctgcccaccagccccccatgatctcaaccagatatcctgagctgttccctgcccaccagtcccccatgtttccagacacccaggtcgctggcacccagaccaccactcatttgcctgcaatcccacctaaccgtgcccctctggtcaccacactcggtgcccatcaaccccctcaagccccagatgcccctgtcctcagaacccaggctacccagcttcccattatccctactgcccagccgtctctgaccaccagctccaggtcccctgtgtctcctgcccatcaagtctctgtgcctgctgccacccagcccccagccctccccaccctcctgccctctcagagccccactaaccagacctcacccatcagccctacacatccccattccaaagtcccccaaatcccaagggaagatggccccagtcccaagctggccctgtggctgccctcagcagctcccacagcagccccaacagccctgggggaggctagtcttgccgagcacatccagagggatgaccggtggcttctggtggcactcctcgtgccaacgtgtgtctttttggtggtcctgcttgcactgggcattgtgtactgcacccgctgtggcccccatgcacccaacaagcgcatcactgactgctatcgctgggtcacccatgctgggagcaagagtccaacagaacccatgccccccaggggcagcctcacaggggtgcagacctgcagaaccagcgtggactacaaagatgatgacgataagtga

SEQ ID NO: 916 - protein, 765 aa, Artificial Sequence
  Macaque endosialin
MLLRLLLAWAAAGPTLGQDPWAAEPRSACGPSSCYALFPRRRTFLEAWRACRELGGDLATPRTPEEAQRVDNLVGAGPASRLLWIGLQRQARQCQLQRPLRGFTWTTGDQDTAFTNWAQPATGGPCPAQRCVALEASGEHRWLEGSCTLAVDGYLCQFGFEGACPALQDEAGQAGPAVYTTPFHLVSTEFEWLPFGSVAAVQCQAGRGASLLCVKQPEGGVGWSRAGPLCLGAGCSPDNGGCEHECVEEVDGHVSCRCTEGFRLAADGRSCEDPCAQAPCEQQCEPGGPQGYSCHCRLGFRPAEDDPHRCVDTDECQIAGVCQQMCVNYVGGFECYCSEGHELEADGISCSPAGAMGARASQDLGDELLDDGEDEEDEDEAWEAFGGGWTEMPGILWMEPTQPPDFALAYRPSFPEDREPQIPYPEPTWPPPLSAPRVPYHSSVLSVTRPVVVSATRPTLPSAHQPPVIPATHPALSRDHQIPVIAANYPDLPSAYQPGILSVSHPAQPPAHQPPMISTRYPELFPAHQSPMFPDTQVAGTQTTTHLPAIPPNRAPLVTTLGAHQPPQAPDAPVLRTQATQLPIIPTAQPSLTTSSRSPVSPAHQVSVPAATQPPALPTLLPSQSPTNQTSPISPTHPHSKVPQIPREDGPSPKLALWLPSAAPTAAPTALGEASLAEHIQRDDRWLLVALLVPTCVFLVVLLALGIVYCTRCGPHAPNKRITDCYRWVTHAGSKSPTEPMPPRGSLTGVQTCRTSVDYKDDDDK

SEQ ID NO: 917 - DNA, 40 bp, Artificial Sequence
  Forward primer
atatgaattcgccaccatgctgctgcgcctgttgctggcc

SEQ ID NO: 918 - DNA, 24 bp, Artificial Sequence
  Reverse primer
gtcttcatcttcctcatcctcccc

SEQ ID NO: 919 - DNA, 26 bp, Artificial Sequence
  Forward primer
gtcaactacgttggtggcttcgagtg

SEQ ID NO: 920 - DNA, 57 bp, Artificial Sequence
  Reverse primer
ggtctagatcacttatcgtcatcatctttgtagtccacgctggttctgcaggtctgc

SEQ ID NO: 921 - DNA, 84 bp, Artificial Sequence
  Primer 5'ED-VH-A-XhoI
ccagctctcgagtcaggasctgagstgrwgaagcctggggcttcagtgaagrtgtcctgcaaggcttctggatacacattcact

SEQ ID NO: 922 - DNA, 81 bp, Artificial Sequence
  Primer 3'ED-VH-B
aatatatccmatccactcaaggckctktccakktsyctgcytcayccagtgtataacatagtcagtgaatgtgtatccaga

SEQ ID NO: 923 - DNA, 66 bp, Artificial Sequence
  Primer 5'ED-VH-C
cttgagtggatkggatatattaatccttatgatgatgatactacctacaaccagaagttcaagggc

SEQ ID NO: 924 - DNA, 70 bp, Artificial Sequence
  Primer 3'ED-VH-D
tgagctscatgtaggctgtgytggmggatktgwctmsagtmawtgtgrccyggcccttgaacttctggtt

SEQ ID NO: 925 - DNA, 70 bp, Artificial Sequence
  Primer 5'ED-VH-E
cacagcctacatgsaactcarcagcctgasatctgaggacactgcagtctattactgtgcaagaaggggg

SEQ ID NO: 926 - DNA, 87 bp, Artificial Sequence
  Primer 3'ED-VH-F-BstEII
cctgatggtgaccaaggttccttgaccccagtagtccatagaatagtcgaagtaaccatcataggagttcccccttcttgcacagta

SEQ ID NO: 927 - DNA, 83 bp, Artificial Sequence
  Primer 5'ED-VL-A-SacI
  misc_feature (64)..(65): n is a, c, g, or t
ccagtcgagctccagctgacccagtctcmaarmttcmtgtccrcatcagtaggagacagagtcnnsatcacctgcagggccag

SEQ ID NO: 928 - DNA, 63 bp, Artificial Sequence
  Primer 3'ED-VL-B
tcctggtttctgttgataccaggctacagcagtacccacattctgactggccctgcaggtgat

SEQ ID NO: 929 - DNA, 72 bp, Artificial Sequence
  Primer 5'ED-VL-C
tatcaacagaaaccaggamaakcccctaaattactgatttactcggcatcgaatcggtacactggagtccct

SEQ ID NO: 930 - DNA, 69 bp, Artificial Sequence
  Primer 3'ED-VL-D
gctgatggtgagagtgaamtctgtcccagatccactgcctgagaagcgayyagggactccagtgtaccg

SEQ ID NO: 931 - DNA, 69 bp, Artificial Sequence
  Primer 5'ED-VL-E
ttcactctcaccatcagcartmtgcagyctgaagacytsgcarmttattwctgccagcaatataccaac

SEQ ID NO: 932 - DNA, 81 bp, Artificial Sequence
  Primer 3'ED-VL-F-BsiWI/SpeI
cctgatactagtcgtacgttttatttccagcttggtcccctgtccaaacgtatacatgggatagttggtatattgctggca

SEQ ID NO: 933 - DNA, 8 bp, Artificial Sequence
  Flag-tag
dykddddk

SEQ ID NO: 934 - protein, 113 aa, Artificial Sequence
  Ep 5-10  VL
ELVMTQSPSSLTVTAGEKVTMSCKSSQSLLNSGNQKNYLTWYQQKPGQPPKLLIYWASTRESGVPDRFTGSGSGTDFTLTISSVQAEDLAVYYCQNDYSYPLTFGAGTKLEIK

SEQ ID NO: 935 - protein, 17 aa, Artificial Sequence
  Ep 5-10 LCDR1
KSSQSLLNSGNQKNYLT

SEQ ID NO: 936 - protein, 7 aa, Artificial Sequence
  Ep 5-10 LCDR2
WASTRES

SEQ ID NO: 937 - protein, 9 aa, Artificial Sequence
  Ep 5-10 LCDR3
QNDYSYPLT

SEQ ID NO: 938 - DNA, 339 bp, Artificial Sequence
  Ep 5-10  VL
gagctcgtgatgacacagtctccatcctccctgactgtgacagcaggagagaaggtcactatgagctgcaagtccagtcagagtctgttaaacagtggaaatcaaaagaactacttgacctggtaccagcagaaaccagggcagcctcctaaactgttgatctactgggcatccactagggaatctggggtccctgatcgcttcacaggcagtggatctggaacagatttcactctcaccatcagcagtgtgcaggctgaagacctggcagtttattactgtcagaatgattatagttatccgctcacgttcggtgctgggaccaagcttgagatcaaa

SEQ ID NO: 939 - protein, 120 aa, Artificial Sequence
  Ep 5-10  HL
EVQLLEQSGAELVRPGTSVKISCKASGYAFTNYWLGWVKQRPGHGLEWIGDIFPGSGNIHYNEKFKGKATLTADKSSSTAYMQLSSLTFEDSAVYFCARLRNWDEPMDYWGQGTTVTVSS

SEQ ID NO: 940 - protein, 5 aa, Artificial Sequence
  Ep 5-10 HCDR1
NYWLG

SEQ ID NO: 941 - protein, 17 aa, Artificial Sequence
  Ep 5-10 HCDR2
DIFPGSGNIHYNEKFKG

SEQ ID NO: 942 - protein, 10 aa, Artificial Sequence
  Ep 5-10 HCDR3
LRNWDEPMDY

SEQ ID NO: 943 - DNA, 360 bp, Artificial Sequence
  Ep 5-10  HL
gaggtgcagctgctcgagcagtctggagctgagctggtaaggcctgggacttcagtgaagatatcctgcaaggcttctggatacgccttcactaactactggctaggttgggtaaagcagaggcctggacatggacttgagtggattggagatattttccctggaagtggtaatatccactacaatgagaagttcaagggcaaagccacactgactgcagacaaatcttcgagcacagcctatatgcagctcagtagcctgacatttgaggactctgctgtctatttctgtgcaagactgaggaactgggacgagcctatggactactggggccaagggaccacggtcaccgtctcctcc

SEQ ID NO: 944 - protein, 502 aa, Artificial Sequence
  Ep 5-10  LH x I2C HL
ELVMTQSPSSLTVTAGEKVTMSCKSSQSLLNSGNQKNYLTWYQQKPGQPPKLLIYWASTRESGVPDRFTGSGSGTDFTLTISSVQAEDLAVYYCQNDYSYPLTFGAGTKLEIKGGGGSGGGGSGGGGSEVQLLEQSGAELVRPGTSVKISCKASGYAFTNYWLGWVKQRPGHGLEWIGDIFPGSGNIHYNEKFKGKATLTADKSSSTAYMQLSSLTFEDSAVYFCARLRNWDEPMDYWGQGTTVTVSSGGGGSEVQLVESGGGLVQPGGSLKLSCAASGFTFNKYAMNWVRQAPGKGLEWVARIRSKYNNYATYYADSVKDRFTISRDDSKNTAYLQMNNLKTEDTAVYYCVRHGNFGNSYISYWAYWGQGTLVTVSSGGGGSGGGGSGGGGSQTVVTQEPSLTVSPGGTVTLTCGSSTGAVTSGNYPNWVQQKPGQAPRGLIGGTKFLAPGTPARFSGSLLGGKAALTLSGVQPEDEAEYYCVLWYSNRWVFGGGTKLTVL

SEQ ID NO: 945 - DNA, 1506 bp, Artificial Sequence
  Ep 5-10  LH x I2C HL
gagctcgtgatgacacagtctccatcctccctgactgtgacagcaggagagaaggtcactatgagctgcaagtccagtcagagtctgttaaacagtggaaatcaaaagaactacttgacctggtaccagcagaaaccagggcagcctcctaaactgttgatctactgggcatccactagggaatctggggtccctgatcgcttcacaggcagtggatctggaacagatttcactctcaccatcagcagtgtgcaggctgaagacctggcagtttattactgtcagaatgattatagttatccgctcacgttcggtgctgggaccaagcttgagatcaaaggtggtggtggttctggcggcggcggctccggtggtggtggttctgaggtgcagctgctcgagcagtctggagctgagctggtaaggcctgggacttcagtgaagatatcctgcaaggcttctggatacgccttcactaactactggctaggttgggtaaagcagaggcctggacatggacttgagtggattggagatattttccctggaagtggtaatatccactacaatgagaagttcaagggcaaagccacactgactgcagacaaatcttcgagcacagcctatatgcagctcagtagcctgacatttgaggactctgctgtctatttctgtgcaagactgaggaactgggacgagcctatggactactggggccaagggaccacggtcaccgtctcctccggaggtggtggatccgaggtgcagctggtcgagtctggaggaggattggtgcagcctggagggtcattgaaactctcatgtgcagcctctggattcaccttcaataagtacgccatgaactgggtccgccaggctccaggaaagggtttggaatgggttgctcgcataagaagtaaatataataattatgcaacatattatgccgattcagtgaaagacaggttcaccatctccagagatgattcaaaaaacactgcctatctacaaatgaacaacttgaaaactgaggacactgccgtgtactactgtgtgagacatgggaacttcggtaatagctacatatcctactgggcttactggggccaagggactctggtcaccgtctcctcaggtggtggtggttctggcggcggcggctccggtggtggtggttctcagactgttgtgactcaggaaccttcactcaccgtatcacctggtggaacagtcacactcacttgtggctcctcgactggggctgttacatctggcaactacccaaactgggtccaacaaaaaccaggtcaggcaccccgtggtctaataggtgggactaagttcctcgcccccggtactcctgccagattctcaggctccctgcttggaggcaaggctgccctcaccctctcaggggtacagccagaggatgaggcagaatattactgtgttctatggtacagcaaccgctgggtgttcggtggaggaaccaaactgactgtccta

SEQ ID NO: 946 - protein, 502 aa, Artificial Sequence
  Ep 5-10  LH x H2C HL
ELVMTQSPSSLTVTAGEKVTMSCKSSQSLLNSGNQKNYLTWYQQKPGQPPKLLIYWASTRESGVPDRFTGSGSGTDFTLTISSVQAEDLAVYYCQNDYSYPLTFGAGTKLEIKGGGGSGGGGSGGGGSEVQLLEQSGAELVRPGTSVKISCKASGYAFTNYWLGWVKQRPGHGLEWIGDIFPGSGNIHYNEKFKGKATLTADKSSSTAYMQLSSLTFEDSAVYFCARLRNWDEPMDYWGQGTTVTVSSGGGGSEVQLVESGGGLVQPGGSLKLSCAASGFTFNKYAMNWVRQAPGKGLEWVARIRSKYNNYATYYADSVKDRFTISRDDSKNTAYLQMNNLKTEDTAVYYCVRHGNFGNSYISYWAYWGQGTLVTVSSGGGGSGGGGSGGGGSQTVVTQEPSLTVSPGGTVTLTCGSSTGAVTSGYYPNWVQQKPGQAPRGLIGGTKFLAPGTPARFSGSLLGGKAALTLSGVQPEDEAEYYCALWYSNRWVFGGGTKLTVL

SEQ ID NO: 947 - DNA, 1506 bp, Artificial Sequence
  Ep 5-10  LH x H2C HL
gagctcgtgatgacacagtctccatcctccctgactgtgacagcaggagagaaggtcactatgagctgcaagtccagtcagagtctgttaaacagtggaaatcaaaagaactacttgacctggtaccagcagaaaccagggcagcctcctaaactgttgatctactgggcatccactagggaatctggggtccctgatcgcttcacaggcagtggatctggaacagatttcactctcaccatcagcagtgtgcaggctgaagacctggcagtttattactgtcagaatgattatagttatccgctcacgttcggtgctgggaccaagcttgagatcaaaggtggtggtggttctggcggcggcggctccggtggtggtggttctgaggtgcagctgctcgagcagtctggagctgagctggtaaggcctgggacttcagtgaagatatcctgcaaggcttctggatacgccttcactaactactggctaggttgggtaaagcagaggcctggacatggacttgagtggattggagatattttccctggaagtggtaatatccactacaatgagaagttcaagggcaaagccacactgactgcagacaaatcttcgagcacagcctatatgcagctcagtagcctgacatttgaggactctgctgtctatttctgtgcaagactgaggaactgggacgagcctatggactactggggccaagggaccacggtcaccgtctcctccggaggtggtggatccgaggtgcagctggtcgagtctggaggaggattggtgcagcctggagggtcattgaaactctcatgtgcagcctctggattcaccttcaataagtacgccatgaactgggtccgccaggctccaggaaagggtttggaatgggttgctcgcataagaagtaaatataataattatgcaacatattatgccgattcagtgaaagacaggttcaccatctccagagatgattcaaaaaacactgcctatctacaaatgaacaacttgaaaactgaggacactgccgtgtactactgtgtgagacatgggaacttcggtaatagctacatatcctactgggcttactggggccaagggactctggtcaccgtctcctcaggtggtggtggttctggcggcggcggctccggtggtggtggttctcagactgttgtgactcaggaaccttcactcaccgtatcacctggtggaacagtcacactcacttgtggctcctcgactggggctgttacatctggctactacccaaactgggtccaacaaaaaccaggtcaggcaccccgtggtctaataggtgggactaagttcctcgcccccggtactcctgccagattctcaggctccctgcttggaggcaaggctgccctcaccctctcaggggtacagccagaggatgaggcagaatattactgtgctctatggtacagcaaccgctgggtgttcggtggaggaaccaaactgactgtccta

SEQ ID NO: 948 - protein, 502 aa, Artificial Sequence
  Ep 5-10  LH x F12Q HL
ELVMTQSPSSLTVTAGEKVTMSCKSSQSLLNSGNQKNYLTWYQQKPGQPPKLLIYWASTRESGVPDRFTGSGSGTDFTLTISSVQAEDLAVYYCQNDYSYPLTFGAGTKLEIKGGGGSGGGGSGGGGSEVQLLEQSGAELVRPGTSVKISCKASGYAFTNYWLGWVKQRPGHGLEWIGDIFPGSGNIHYNEKFKGKATLTADKSSSTAYMQLSSLTFEDSAVYFCARLRNWDEPMDYWGQGTTVTVSSGGGGSEVQLVESGGGLVQPGGSLKLSCAASGFTFNSYAMNWVRQAPGKGLEWVARIRSKYNNYATYYADSVKGRFTISRDDSKNTAYLQMNNLKTEDTAVYYCVRHGNFGNSYVSWWAYWGQGTLVTVSSGGGGSGGGGSGGGGSQTVVTQEPSLTVSPGGTVTLTCGSSTGAVTSGNYPNWVQQKPGQAPRGLIGGTKFLAPGTPARFSGSLLGGKAALTLSGVQPEDEAEYYCVLWYSNRWVFGGGTKLTVL

SEQ ID NO: 949 - DNA, 1506 bp, Artificial Sequence
  Ep 5-10  LH x F12Q HL
gagctcgtgatgacacagtctccatcctccctgactgtgacagcaggagagaaggtcactatgagctgcaagtccagtcagagtctgttaaacagtggaaatcaaaagaactacttgacctggtaccagcagaaaccagggcagcctcctaaactgttgatctactgggcatccactagggaatctggggtccctgatcgcttcacaggcagtggatctggaacagatttcactctcaccatcagcagtgtgcaggctgaagacctggcagtttattactgtcagaatgattatagttatccgctcacgttcggtgctgggaccaagcttgagatcaaaggtggtggtggttctggcggcggcggctccggtggtggtggttctgaggtgcagctgctcgagcagtctggagctgagctggtaaggcctgggacttcagtgaagatatcctgcaaggcttctggatacgccttcactaactactggctaggttgggtaaagcagaggcctggacatggacttgagtggattggagatattttccctggaagtggtaatatccactacaatgagaagttcaagggcaaagccacactgactgcagacaaatcttcgagcacagcctatatgcagctcagtagcctgacatttgaggactctgctgtctatttctgtgcaagactgaggaactgggacgagcctatggactactggggccaagggaccacggtcaccgtctcctccggaggtggtggatccgaggtgcagctggtcgagtctggaggaggattggtgcagcctggagggtcattgaaactctcatgtgcagcctctggattcaccttcaatagctacgccatgaactgggtccgccaggctccaggaaagggtttggaatgggttgctcgcataagaagtaaatataataattatgcaacatattatgccgattcagtgaaaggcaggttcaccatctccagagatgattcaaaaaacactgcctatctacaaatgaacaacttgaaaactgaggacactgccgtgtactactgtgtgagacatgggaacttcggtaatagctacgtttcctggtgggcttactggggccaagggactctggtcaccgtctcctcaggtggtggtggttctggcggcggcggctccggtggtggtggttctcagactgttgtgactcaggaaccttcactcaccgtatcacctggtggaacagtcacactcacttgtggctcctcgactggggctgttacatctggcaactacccaaactgggtccaacaaaaaccaggtcaggcaccccgtggtctaataggtgggactaagttcctcgcccccggtactcctgccagattctcaggctccctgcttggaggcaaggctgccctcaccctctcaggggtacagccagaggatgaggcagaatattactgtgttctatggtacagcaaccgctgggtgttcggtggaggaaccaaactgactgtccta

SEQ ID NO: 950 - protein, 113 aa, Artificial Sequence
  hEp 14-A1 L
DIVMTQTPLSLPVTPGEPVSISCKSSQSLLNSGNQKNYLTWYLQKPGQSPQLLIYWASTRESGVPDRFSGSGSGTDFTLTISSVQAEDVGVYYCQNDYSYPLTFGQGTKLEIK

SEQ ID NO: 951 - protein, 17 aa, Artificial Sequence
  hEp 14-A1 LCDR1
KSSQSLLNSGNQKNYLT

SEQ ID NO: 952 - protein, 7 aa, Artificial Sequence
  hEp 14-A1 LCDR2
WASTRES

SEQ ID NO: 953 - protein, 9 aa, Artificial Sequence
  hEp 14-A1 LCDR3
QNDYSYPLT

SEQ ID NO: 954 - DNA, 339 bp, Artificial Sequence
  hEp 14-A1 L
gacatcgtgatgacacagactccactctccctgcctgtgacaccaggagagccggtctctatcagctgcaagtccagtcagagtctgttaaacagtggaaatcaaaagaactacttgacctggtacctgcagaaaccagggcagtctcctcaactgttgatctactgggcatccactagggaatctggggtccctgatcgcttctcaggcagtggatctggaacagatttcactctcacaatcagcagtgtgcaggctgaagacgtgggagtttattactgtcagaatgattatagttatccgctcacgttcggtcaagggaccaagcttgagatcaaa

SEQ ID NO: 955 - protein, 119 aa, Artificial Sequence
  hEp 14-A1 H
QVQLVQSGAEVKKPGSSVKISCKASGYTFSNYWLGWVRQAPGQGLEWIGDIFPGSGNIHYNEKFKGRVTITADKSTSTAYMELSSLTSEDTAVYYCARLRNWDEPMDYWGQGTTVTVSS

SEQ ID NO: 956 - protein, 5 aa, Artificial Sequence
  hEp 14-A1 HCDR1
NYWLG

SEQ ID NO: 957 - protein, 17 aa, Artificial Sequence
  hEp 14-A1 HCDR2
DIFPGSGNIHYNEKFKG

SEQ ID NO: 958 - protein, 10 aa, Artificial Sequence
  hEp 14-A1 HCDR3
LRNWDEPMDY

SEQ ID NO: 959 - DNA, 357 bp, Artificial Sequence
  hEp 14-A1 H
caggtgcagctggtccagtctggagctgaggtgaaaaagcctgggtcttcagtgaagatatcctgcaaggcttctggatacaccttctctaactactggctaggttgggtaaggcaggcgcctggacagggacttgagtggattggagatattttccctggaagtggtaatatccactacaatgagaagttcaagggcagagtcacaatcactgcagacaaatctacgagcacagcctatatggaactcagtagcctgacatctgaggacactgctgtctattactgtgcaagactgaggaactgggacgagcctatggactactggggccaagggaccacggtcaccgtctcctcc

SEQ ID NO: 960 - protein, 501 aa, Artificial Sequence
  hEp 14-A1 LH x I2C HL
DIVMTQTPLSLPVTPGEPVSISCKSSQSLLNSGNQKNYLTWYLQKPGQSPQLLIYWASTRESGVPDRFSGSGSGTDFTLTISSVQAEDVGVYYCQNDYSYPLTFGQGTKLEIKGGGGSGGGGSGGGGSQVQLVQSGAEVKKPGSSVKISCKASGYTFSNYWLGWVRQAPGQGLEWIGDIFPGSGNIHYNEKFKGRVTITADKSTSTAYMELSSLTSEDTAVYYCARLRNWDEPMDYWGQGTTVTVSSGGGGSEVQLVESGGGLVQPGGSLKLSCAASGFTFNKYAMNWVRQAPGKGLEWVARIRSKYNNYATYYADSVKDRFTISRDDSKNTAYLQMNNLKTEDTAVYYCVRHGNFGNSYISYWAYWGQGTLVTVSSGGGGSGGGGSGGGGSQTVVTQEPSLTVSPGGTVTLTCGSSTGAVTSGNYPNWVQQKPGQAPRGLIGGTKFLAPGTPARFSGSLLGGKAALTLSGVQPEDEAEYYCVLWYSNRWVFGGGTKLTVL

SEQ ID NO: 961 - DNA, 1503 bp, Artificial Sequence
  hEp 14-A1 LH x I2C HL
gacatcgtgatgacacagactccactctccctgcctgtgacaccaggagagccggtctctatcagctgcaagtccagtcagagtctgttaaacagtggaaatcaaaagaactacttgacctggtacctgcagaaaccagggcagtctcctcaactgttgatctactgggcatccactagggaatctggggtccctgatcgcttctcaggcagtggatctggaacagatttcactctcacaatcagcagtgtgcaggctgaagacgtgggagtttattactgtcagaatgattatagttatccgctcacgttcggtcaagggaccaagcttgagatcaaaggtggtggtggttctggcggcggcggctccggtggtggtggttctcaggtgcagctggtccagtctggagctgaggtgaaaaagcctgggtcttcagtgaagatatcctgcaaggcttctggatacaccttctctaactactggctaggttgggtaaggcaggcgcctggacagggacttgagtggattggagatattttccctggaagtggtaatatccactacaatgagaagttcaagggcagagtcacaatcactgcagacaaatctacgagcacagcctatatggaactcagtagcctgacatctgaggacactgctgtctattactgtgcaagactgaggaactgggacgagcctatggactactggggccaagggaccacggtcaccgtctcctccggaggtggtggatccgaggtgcagctggtcgagtctggaggaggattggtgcagcctggagggtcattgaaactctcatgtgcagcctctggattcaccttcaataagtacgccatgaactgggtccgccaggctccaggaaagggtttggaatgggttgctcgcataagaagtaaatataataattatgcaacatattatgccgattcagtgaaagacaggttcaccatctccagagatgattcaaaaaacactgcctatctacaaatgaacaacttgaaaactgaggacactgccgtgtactactgtgtgagacatgggaacttcggtaatagctacatatcctactgggcttactggggccaagggactctggtcaccgtctcctcaggtggtggtggttctggcggcggcggctccggtggtggtggttctcagactgttgtgactcaggaaccttcactcaccgtatcacctggtggaacagtcacactcacttgtggctcctcgactggggctgttacatctggcaactacccaaactgggtccaacaaaaaccaggtcaggcaccccgtggtctaataggtgggactaagttcctcgcccccggtactcctgccagattctcaggctccctgcttggaggcaaggctgccctcaccctctcaggggtacagccagaggatgaggcagaatattactgtgttctatggtacagcaaccgctgggtgttcggtggaggaaccaaactgactgtccta

SEQ ID NO: 962 - protein, 113 aa, Artificial Sequence
  hEp 14-D2 L
DIVMTQTPLSLPVTPGEQVSISCKSSQSLLNSGNQKNYLTWYQQKPGQSPQLLIYWASTRESGVPDRFSGSGSGTDFTLKISRVEAEDVGVYYCQNDYSYPLTFGQGTKLEIK

SEQ ID NO: 963 - protein, 17 aa, Artificial Sequence
  hEp 14-D2 LCDR1
KSSQSLLNSGNQKNYLT

SEQ ID NO: 964 - protein, 7 aa, Artificial Sequence
  hEp 14-D2 LCDR2
WASTRES

SEQ ID NO: 965 - protein, 9 aa, Artificial Sequence
  hEp 14-D2 LCDR3
QNDYSYPLT

SEQ ID NO: 966 - DNA, 339 bp, Artificial Sequence
  hEp 14-D2 L
gacatcgtgatgacacagactccactctccctgcctgtgacaccaggagagcaggtctctatcagctgcaagtccagtcagagtctgttaaacagtggaaatcaaaagaactacttgacctggtaccagcagaaaccagggcagtctcctcaactgttgatctactgggcatccactagggaatctggggtccctgatcgcttctcaggcagtggatctggaacagatttcactctcaaaatcagccgtgtggaggctgaagacgtgggagtttattactgtcagaatgattatagttatccgctcacgttcggtcaagggaccaagcttgagatcaaa

SEQ ID NO: 967 - protein, 119 aa, Artificial Sequence
  hEp 14-D2 H
QVQLVQSGAEVKKPGSSVKVSCKASGYTFSNYWLGWVRQAPGQGLEWMGDIFPGSGNIHYNEKFKGRVTITADKSTSTAYMELSSLTSEDTAVYYCARLRNWDEPMDYWGQGTTVTVSS

SEQ ID NO: 968 - protein, 5 aa, Artificial Sequence
  hEp 14-D2 HCDR1
NYWLG

SEQ ID NO: 969 - protein, 17 aa, Artificial Sequence
  hEp 14-D2 HCDR2
DIFPGSGNIHYNEKFKG

SEQ ID NO: 970 - protein, 10 aa, Artificial Sequence
  hEp 14-D2 HCDR3
LRNWDEPMDY

SEQ ID NO: 971 - DNA, 357 bp, Artificial Sequence
  hEp 14-D2 H
caggtgcagctggtccagtctggagctgaggtgaaaaagcctgggtcttcagtgaaggtatcctgcaaggcttctggatacaccttctctaactactggctaggttgggtaaggcaggcgcctggacagggacttgagtggatgggagatattttccctggaagtggtaatatccactacaatgagaagttcaagggcagagtcacaatcactgcagacaaatctacgagcacagcctatatggaactcagtagcctgacatctgaggacactgctgtctattactgtgcaagactgaggaactgggacgagcctatggactactggggccaagggaccacggtcaccgtctcctcc

SEQ ID NO: 972 - protein, 501 aa, Artificial Sequence
  hEp 14-D2 LH x I2C HL
DIVMTQTPLSLPVTPGEQVSISCKSSQSLLNSGNQKNYLTWYQQKPGQSPQLLIYWASTRESGVPDRFSGSGSGTDFTLKISRVEAEDVGVYYCQNDYSYPLTFGQGTKLEIKGGGGSGGGGSGGGGSQVQLVQSGAEVKKPGSSVKVSCKASGYTFSNYWLGWVRQAPGQGLEWMGDIFPGSGNIHYNEKFKGRVTITADKSTSTAYMELSSLTSEDTAVYYCARLRNWDEPMDYWGQGTTVTVSSGGGGSEVQLVESGGGLVQPGGSLKLSCAASGFTFNKYAMNWVRQAPGKGLEWVARIRSKYNNYATYYADSVKDRFTISRDDSKNTAYLQMNNLKTEDTAVYYCVRHGNFGNSYISYWAYWGQGTLVTVSSGGGGSGGGGSGGGGSQTVVTQEPSLTVSPGGTVTLTCGSSTGAVTSGNYPNWVQQKPGQAPRGLIGGTKFLAPGTPARFSGSLLGGKAALTLSGVQPEDEAEYYCVLWYSNRWVFGGGTKLTVL

SEQ ID NO: 973 - DNA, 1503 bp, Artificial Sequence
  hEp 14-D2 LH x I2C HL
gacatcgtgatgacacagactccactctccctgcctgtgacaccaggagagcaggtctctatcagctgcaagtccagtcagagtctgttaaacagtggaaatcaaaagaactacttgacctggtaccagcagaaaccagggcagtctcctcaactgttgatctactgggcatccactagggaatctggggtccctgatcgcttctcaggcagtggatctggaacagatttcactctcaaaatcagccgtgtggaggctgaagacgtgggagtttattactgtcagaatgattatagttatccgctcacgttcggtcaagggaccaagcttgagatcaaaggtggtggtggttctggcggcggcggctccggtggtggtggttctcaggtgcagctggtccagtctggagctgaggtgaaaaagcctgggtcttcagtgaaggtatcctgcaaggcttctggatacaccttctctaactactggctaggttgggtaaggcaggcgcctggacagggacttgagtggatgggagatattttccctggaagtggtaatatccactacaatgagaagttcaagggcagagtcacaatcactgcagacaaatctacgagcacagcctatatggaactcagtagcctgacatctgaggacactgctgtctattactgtgcaagactgaggaactgggacgagcctatggactactggggccaagggaccacggtcaccgtctcctccggaggtggtggatccgaggtgcagctggtcgagtctggaggaggattggtgcagcctggagggtcattgaaactctcatgtgcagcctctggattcaccttcaataagtacgccatgaactgggtccgccaggctccaggaaagggtttggaatgggttgctcgcataagaagtaaatataataattatgcaacatattatgccgattcagtgaaagacaggttcaccatctccagagatgattcaaaaaacactgcctatctacaaatgaacaacttgaaaactgaggacactgccgtgtactactgtgtgagacatgggaacttcggtaatagctacatatcctactgggcttactggggccaagggactctggtcaccgtctcctcaggtggtggtggttctggcggcggcggctccggtggtggtggttctcagactgttgtgactcaggaaccttcactcaccgtatcacctggtggaacagtcacactcacttgtggctcctcgactggggctgttacatctggcaactacccaaactgggtccaacaaaaaccaggtcaggcaccccgtggtctaataggtgggactaagttcctcgcccccggtactcctgccagattctcaggctccctgcttggaggcaaggctgccctcaccctctcaggggtacagccagaggatgaggcagaatattactgtgttctatggtacagcaaccgctgggtgttcggtggaggaaccaaactgactgtccta

SEQ ID NO: 974 - protein, 113 aa, Artificial Sequence
  hEp 14-H8 L
DIVMTQTPLSLPVTPGEPASISCKSSQSLLNSGNQKNYLTWYQQKPGQSPKLLIYWASTRESGVPDRFSGSGSGTDFTLKISRVEAEDVGVYYCQNDYSYPLTFGQGTKLEIK

SEQ ID NO: 975 - protein, 17 aa, Artificial Sequence
  hEp 14-H8 LCDR1
KSSQSLLNSGNQKNYLT

SEQ ID NO: 976 - protein, 7 aa, Artificial Sequence
  hEp 14-H8 LCDR2
WASTRES

SEQ ID NO: 977 - protein, 9 aa, Artificial Sequence
  hEp 14-H8 LCDR3
QNDYSYPLT

SEQ ID NO: 978 - DNA, 339 bp, Artificial Sequence
  hEp 14-H8 L
gacatcgtgatgacacagactccactctccctgcctgtgacaccaggagagccggcctctatcagctgcaagtccagtcagagtctgttaaacagtggaaatcaaaagaactacttgacctggtaccagcagaaaccagggcagtctcctaaactgttgatctactgggcatccactagggaatctggggtccctgatcgcttctcaggcagtggatctggaacagatttcactctcaaaatcagccgtgtggaggctgaagacgtgggagtttattactgtcagaatgattatagttatccgctcacgttcggtcaagggaccaagcttgagatcaaa

SEQ ID NO: 979 - protein, 119 aa, Artificial Sequence
  hEp 14-H8 H
QVQLVQSGAELKKPGSSVKVSCKASGYTFSNYWLGWVRQTPGQGLEWMGDIFPGSGNIHYNEKFKGRVTITADKSTSTAYMELSSLRSEDTAVYYCARLRNWDEPMDYWGQGTTVTVSS

SEQ ID NO: 980 - protein, 5 aa, Artificial Sequence
  hEp 14-H8 HCDR1
NYWLG

SEQ ID NO: 981 - protein, 17 aa, Artificial Sequence
  hEp 14-H8 HCDR2
DIFPGSGNIHYNEKFKG

SEQ ID NO: 982 - protein, 10 aa, Artificial Sequence
  hEp 14-H8 HCDR3
LRNWDEPMDY

SEQ ID NO: 983 - DNA, 357 bp, Artificial Sequence
  hEp 14-H8 H
caggtgcagctggtccagtctggagctgagctgaaaaagcctgggtcttcagtgaaggtatcctgcaaggcttctggatacaccttctctaactactggctaggttgggtaaggcagacgcctggacagggacttgagtggatgggagatattttccctggaagtggtaatatccactacaatgagaagttcaagggcagagtcacaatcactgcagacaaatctacgagcacagcctatatggaactcagtagcctgagatctgaggacactgctgtctattactgtgcaagactgaggaactgggacgagcctatggactactggggccaagggaccacggtcaccgtctcctcc

SEQ ID NO: 984 - protein, 501 aa, Artificial Sequence
  hEp 14-H8 LH x I2C HL
DIVMTQTPLSLPVTPGEPASISCKSSQSLLNSGNQKNYLTWYQQKPGQSPKLLIYWASTRESGVPDRFSGSGSGTDFTLKISRVEAEDVGVYYCQNDYSYPLTFGQGTKLEIKGGGGSGGGGSGGGGSQVQLVQSGAELKKPGSSVKVSCKASGYTFSNYWLGWVRQTPGQGLEWMGDIFPGSGNIHYNEKFKGRVTITADKSTSTAYMELSSLRSEDTAVYYCARLRNWDEPMDYWGQGTTVTVSSGGGGSEVQLVESGGGLVQPGGSLKLSCAASGFTFNKYAMNWVRQAPGKGLEWVARIRSKYNNYATYYADSVKDRFTISRDDSKNTAYLQMNNLKTEDTAVYYCVRHGNFGNSYISYWAYWGQGTLVTVSSGGGGSGGGGSGGGGSQTVVTQEPSLTVSPGGTVTLTCGSSTGAVTSGNYPNWVQQKPGQAPRGLIGGTKFLAPGTPARFSGSLLGGKAALTLSGVQPEDEAEYYCVLWYSNRWVFGGGTKLTVL

SEQ ID NO: 985 - DNA, 1503 bp, Artificial Sequence
  hEp 14-H8 LH x I2C HL
gacatcgtgatgacacagactccactctccctgcctgtgacaccaggagagccggcctctatcagctgcaagtccagtcagagtctgttaaacagtggaaatcaaaagaactacttgacctggtaccagcagaaaccagggcagtctcctaaactgttgatctactgggcatccactagggaatctggggtccctgatcgcttctcaggcagtggatctggaacagatttcactctcaaaatcagccgtgtggaggctgaagacgtgggagtttattactgtcagaatgattatagttatccgctcacgttcggtcaagggaccaagcttgagatcaaaggtggtggtggttctggcggcggcggctccggtggtggtggttctcaggtgcagctggtccagtctggagctgagctgaaaaagcctgggtcttcagtgaaggtatcctgcaaggcttctggatacaccttctctaactactggctaggttgggtaaggcagacgcctggacagggacttgagtggatgggagatattttccctggaagtggtaatatccactacaatgagaagttcaagggcagagtcacaatcactgcagacaaatctacgagcacagcctatatggaactcagtagcctgagatctgaggacactgctgtctattactgtgcaagactgaggaactgggacgagcctatggactactggggccaagggaccacggtcaccgtctcctccggaggtggtggatccgaggtgcagctggtcgagtctggaggaggattggtgcagcctggagggtcattgaaactctcatgtgcagcctctggattcaccttcaataagtacgccatgaactgggtccgccaggctccaggaaagggtttggaatgggttgctcgcataagaagtaaatataataattatgcaacatattatgccgattcagtgaaagacaggttcaccatctccagagatgattcaaaaaacactgcctatctacaaatgaacaacttgaaaactgaggacactgccgtgtactactgtgtgagacatgggaacttcggtaatagctacatatcctactgggcttactggggccaagggactctggtcaccgtctcctcaggtggtggtggttctggcggcggcggctccggtggtggtggttctcagactgttgtgactcaggaaccttcactcaccgtatcacctggtggaacagtcacactcacttgtggctcctcgactggggctgttacatctggcaactacccaaactgggtccaacaaaaaccaggtcaggcaccccgtggtctaataggtgggactaagttcctcgcccccggtactcctgccagattctcaggctccctgcttggaggcaaggctgccctcaccctctcaggggtacagccagaggatgaggcagaatattactgtgttctatggtacagcaaccgctgggtgttcggtggaggaaccaaactgactgtccta

SEQ ID NO: 986 - protein, 113 aa, Artificial Sequence
  hEp 14-A6 L
DIVMTQTPFSLTVTPGETVSISCKSSQSLLNSGNQKNYLTWYLQKPGQSPQLLIYWASTRESGVPDRFSGSGSGTDFTLTISSVEAEDVGVYYCQNDYSYPLTFGQGTKLEIK

SEQ ID NO: 987 - protein, 17 aa, Artificial Sequence
  hEp 14-A6 LCDR1
KSSQSLLNSGNQKNYLT

SEQ ID NO: 988 - protein, 7 aa, Artificial Sequence
  hEp 14-A6 LCDR2
WASTRES

SEQ ID NO: 989 - protein, 9 aa, Artificial Sequence
  hEp 14-A6 LCDR3
QNDYSYPLT

SEQ ID NO: 990 - DNA, 339 bp, Artificial Sequence
  hEp 14-A6 L
gacatcgtgatgacacagactccattctccctgactgtgacaccaggagagacggtctctatcagctgcaagtccagtcagagtctgttaaacagtggaaatcaaaagaactacttgacctggtacctgcagaaaccagggcagtctcctcaactgttgatctactgggcatccactagggaatctggggtccctgatcgcttctcaggcagtggatctggaacagatttcactctcacaatcagcagtgtggaggctgaagacgtgggagtttattactgtcagaatgattatagttatccgctcacgttcggtcaagggaccaagcttgagatcaaa

SEQ ID NO: 991 - protein, 119 aa, Artificial Sequence
  hEp 14-A6 H
QVQLVQSGAELVKPGSSVKVSCKASGYTFSNYWLGWVRQAPGQGLEWIGDIFPGSGNIHYNEKFKGKVTITADKSTSTAYMELSSLRFEDTAVYYCARLRNWDEPMDYWGQGTTVTVSS

SEQ ID NO: 992 - protein, 5 aa, Artificial Sequence
  hEp 14-A6 HCDR1
NYWLG

SEQ ID NO: 993 - protein, 17 aa, Artificial Sequence
  hEp 14-A6 HCDR2
DIFPGSGNIHYNEKFKG

SEQ ID NO: 994 - protein, 10 aa, Artificial Sequence
  hEp 14-A6 HCDR3
LRNWDEPMDY

SEQ ID NO: 995 - DNA, 357 bp, Artificial Sequence
  hEp 14-A6 H
caggtgcagctggtccagtctggagctgagctggtaaagcctgggtcttcagtgaaggtatcctgcaaggcttctggatacaccttctctaactactggctaggttgggtaaggcaggcgcctggacagggacttgagtggattggagatattttccctggaagtggtaatatccactacaatgagaagttcaagggcaaagtcacaatcactgcagacaaatctacgagcacagcctatatggaactcagtagcctgagatttgaggacactgctgtctattactgtgcaagactgaggaactgggacgagcctatggactactggggccaagggaccacggtcaccgtctcctcc

SEQ ID NO: 996 - protein, 501 aa, Artificial Sequence
  hEp 14-A6 LH x I2C HL
DIVMTQTPFSLTVTPGETVSISCKSSQSLLNSGNQKNYLTWYLQKPGQSPQLLIYWASTRESGVPDRFSGSGSGTDFTLTISSVEAEDVGVYYCQNDYSYPLTFGQGTKLEIKGGGGSGGGGSGGGGSQVQLVQSGAELVKPGSSVKVSCKASGYTFSNYWLGWVRQAPGQGLEWIGDIFPGSGNIHYNEKFKGKVTITADKSTSTAYMELSSLRFEDTAVYYCARLRNWDEPMDYWGQGTTVTVSSGGGGSEVQLVESGGGLVQPGGSLKLSCAASGFTFNKYAMNWVRQAPGKGLEWVARIRSKYNNYATYYADSVKDRFTISRDDSKNTAYLQMNNLKTEDTAVYYCVRHGNFGNSYISYWAYWGQGTLVTVSSGGGGSGGGGSGGGGSQTVVTQEPSLTVSPGGTVTLTCGSSTGAVTSGNYPNWVQQKPGQAPRGLIGGTKFLAPGTPARFSGSLLGGKAALTLSGVQPEDEAEYYCVLWYSNRWVFGGGTKLTVL

SEQ ID NO: 997 - DNA, 1503 bp, Artificial Sequence
  hEp 14-A6 LH x I2C HL
gacatcgtgatgacacagactccattctccctgactgtgacaccaggagagacggtctctatcagctgcaagtccagtcagagtctgttaaacagtggaaatcaaaagaactacttgacctggtacctgcagaaaccagggcagtctcctcaactgttgatctactgggcatccactagggaatctggggtccctgatcgcttctcaggcagtggatctggaacagatttcactctcacaatcagcagtgtggaggctgaagacgtgggagtttattactgtcagaatgattatagttatccgctcacgttcggtcaagggaccaagcttgagatcaaaggtggtggtggttctggcggcggcggctccggtggtggtggttctcaggtgcagctggtccagtctggagctgagctggtaaagcctgggtcttcagtgaaggtatcctgcaaggcttctggatacaccttctctaactactggctaggttgggtaaggcaggcgcctggacagggacttgagtggattggagatattttccctggaagtggtaatatccactacaatgagaagttcaagggcaaagtcacaatcactgcagacaaatctacgagcacagcctatatggaactcagtagcctgagatttgaggacactgctgtctattactgtgcaagactgaggaactgggacgagcctatggactactggggccaagggaccacggtcaccgtctcctccggaggtggtggatccgaggtgcagctggtcgagtctggaggaggattggtgcagcctggagggtcattgaaactctcatgtgcagcctctggattcaccttcaataagtacgccatgaactgggtccgccaggctccaggaaagggtttggaatgggttgctcgcataagaagtaaatataataattatgcaacatattatgccgattcagtgaaagacaggttcaccatctccagagatgattcaaaaaacactgcctatctacaaatgaacaacttgaaaactgaggacactgccgtgtactactgtgtgagacatgggaacttcggtaatagctacatatcctactgggcttactggggccaagggactctggtcaccgtctcctcaggtggtggtggttctggcggcggcggctccggtggtggtggttctcagactgttgtgactcaggaaccttcactcaccgtatcacctggtggaacagtcacactcacttgtggctcctcgactggggctgttacatctggcaactacccaaactgggtccaacaaaaaccaggtcaggcaccccgtggtctaataggtgggactaagttcctcgcccccggtactcctgccagattctcaggctccctgcttggaggcaaggctgccctcaccctctcaggggtacagccagaggatgaggcagaatattactgtgttctatggtacagcaaccgctgggtgttcggtggaggaaccaaactgactgtccta

SEQ ID NO: 998 - protein, 113 aa, Artificial Sequence
  hEp 14-D1 L
DIVMTQTPFSLTVTPGEPASISCKSSQSLLNSGNQKNYLTWYQQKPGQPPQLLIYWASTRESGVPDRFSGSGSGTDFTLKISRVEAEDVAVYYCQNDYSYPLTFGQGTKLEIK

SEQ ID NO: 999 - protein, 17 aa, Artificial Sequence
  hEp 14-D1 LCDR1
KSSQSLLNSGNQKNYLT

SEQ ID NO: 1000 - protein, 7 aa, Artificial Sequence
  hEp 14-D1 LCDR2
WASTRES

SEQ ID NO: 1001 - protein, 9 aa, Artificial Sequence
  hEp 14-D1 LCDR3
QNDYSYPLT

SEQ ID NO: 1002 - DNA, 339 bp, Artificial Sequence
  hEp 14-D1 L
gacatcgtgatgacacagactccattctccctgactgtgacaccaggagagccggcctctatcagctgcaagtccagtcagagtctgttaaacagtggaaatcaaaagaactacttgacctggtaccagcagaaaccagggcagcctcctcaactgttgatctactgggcatccactagggaatctggggtccctgatcgcttctcaggcagtggatctggaacagatttcactctcaaaatcagccgtgtggaggctgaagacgtggcagtttattactgtcagaatgattatagttatccgctcacgttcggtcaagggaccaagcttgagatcaaa

SEQ ID NO: 1003 - protein, 119 aa, Artificial Sequence
  hEp 14-D1 H
QVQLVQSGAELKKPGSSVKISCKASGYTFSNYWLGWVRQAPGQGLEWMGDIFPGSGNIHYNEKFKGRVTLTADKSTSTAYMELSSLTSEDTAVYYCARLRNWDEPMDYWGQGTTVTVSS

SEQ ID NO: 1004 - protein, 5 aa, Artificial Sequence
  hEp 14-D1 HCDR1
NYWLG

SEQ ID NO: 1005 - protein, 17 aa, Artificial Sequence
  hEp 14-D1 HCDR2
DIFPGSGNIHYNEKFKG

SEQ ID NO: 1006 - protein, 10 aa, Artificial Sequence
  hEp 14-D1 HCDR3
LRNWDEPMDY

SEQ ID NO: 1007 - DNA, 357 bp, Artificial Sequence
  hEp 14-D1 H
caggtgcagctggtccagtctggagctgagctgaaaaagcctgggtcttcagtgaagatatcctgcaaggcttctggatacaccttctctaactactggctaggttgggtaaggcaggcgcctggacagggacttgagtggatgggagatattttccctggaagtggtaatatccactacaatgagaagttcaagggcagagtcacactcactgcagacaaatctacgagcacagcctatatggaactcagtagcctgacatctgaggacactgctgtctattactgtgcaagactgaggaactgggacgagcctatggactactggggccaagggaccacggtcaccgtctcctcc

SEQ ID NO: 1008 - protein, 501 aa, Artificial Sequence
  hEp 14-D1 LH x I2C HL
DIVMTQTPFSLTVTPGEPASISCKSSQSLLNSGNQKNYLTWYQQKPGQPPQLLIYWASTRESGVPDRFSGSGSGTDFTLKISRVEAEDVAVYYCQNDYSYPLTFGQGTKLEIKGGGGSGGGGSGGGGSQVQLVQSGAELKKPGSSVKISCKASGYTFSNYWLGWVRQAPGQGLEWMGDIFPGSGNIHYNEKFKGRVTLTADKSTSTAYMELSSLTSEDTAVYYCARLRNWDEPMDYWGQGTTVTVSSGGGGSEVQLVESGGGLVQPGGSLKLSCAASGFTFNKYAMNWVRQAPGKGLEWVARIRSKYNNYATYYADSVKDRFTISRDDSKNTAYLQMNNLKTEDTAVYYCVRHGNFGNSYISYWAYWGQGTLVTVSSGGGGSGGGGSGGGGSQTVVTQEPSLTVSPGGTVTLTCGSSTGAVTSGNYPNWVQQKPGQAPRGLIGGTKFLAPGTPARFSGSLLGGKAALTLSGVQPEDEAEYYCVLWYSNRWVFGGGTKLTVL

SEQ ID NO: 1009 - DNA, 1503 bp, Artificial Sequence
  hEp 14-D1 LH x I2C HL
gacatcgtgatgacacagactccattctccctgactgtgacaccaggagagccggcctctatcagctgcaagtccagtcagagtctgttaaacagtggaaatcaaaagaactacttgacctggtaccagcagaaaccagggcagcctcctcaactgttgatctactgggcatccactagggaatctggggtccctgatcgcttctcaggcagtggatctggaacagatttcactctcaaaatcagccgtgtggaggctgaagacgtggcagtttattactgtcagaatgattatagttatccgctcacgttcggtcaagggaccaagcttgagatcaaaggtggtggtggttctggcggcggcggctccggtggtggtggttctcaggtgcagctggtccagtctggagctgagctgaaaaagcctgggtcttcagtgaagatatcctgcaaggcttctggatacaccttctctaactactggctaggttgggtaaggcaggcgcctggacagggacttgagtggatgggagatattttccctggaagtggtaatatccactacaatgagaagttcaagggcagagtcacactcactgcagacaaatctacgagcacagcctatatggaactcagtagcctgacatctgaggacactgctgtctattactgtgcaagactgaggaactgggacgagcctatggactactggggccaagggaccacggtcaccgtctcctccggaggtggtggatccgaggtgcagctggtcgagtctggaggaggattggtgcagcctggagggtcattgaaactctcatgtgcagcctctggattcaccttcaataagtacgccatgaactgggtccgccaggctccaggaaagggtttggaatgggttgctcgcataagaagtaaatataataattatgcaacatattatgccgattcagtgaaagacaggttcaccatctccagagatgattcaaaaaacactgcctatctacaaatgaacaacttgaaaactgaggacactgccgtgtactactgtgtgagacatgggaacttcggtaatagctacatatcctactgggcttactggggccaagggactctggtcaccgtctcctcaggtggtggtggttctggcggcggcggctccggtggtggtggttctcagactgttgtgactcaggaaccttcactcaccgtatcacctggtggaacagtcacactcacttgtggctcctcgactggggctgttacatctggcaactacccaaactgggtccaacaaaaaccaggtcaggcaccccgtggtctaataggtgggactaagttcctcgcccccggtactcctgccagattctcaggctccctgcttggaggcaaggctgccctcaccctctcaggggtacagccagaggatgaggcagaatattactgtgttctatggtacagcaaccgctgggtgttcggtggaggaaccaaactgactgtccta

SEQ ID NO: 1010 - protein, 113 aa, Artificial Sequence
  hEp 14-G6 L
DIVMTQTPLSLTVTPGEPVSISCKSSQSLLNSGNQKNYLTWYLQKPGQPPQLLIYWASTRESGVPDRFSGSGSGTDFTLKISRVQAEDVGVYYCQNDYSYPLTFGQGTKLEIK

SEQ ID NO: 1011 - protein, 17 aa, Artificial Sequence
  hEp 14-G6 LCDR1
KSSQSLLNSGNQKNYLT

SEQ ID NO: 1012 - protein, 7 aa, Artificial Sequence
  hEp 14-G6 LCDR2
WASTRES

SEQ ID NO: 1013 - protein, 9 aa, Artificial Sequence
  hEp 14-G6 LCDR3
QNDYSYPLT

SEQ ID NO: 1014 - DNA, 339 bp, Artificial Sequence
  hEp 14-G6 L
gacatcgtgatgacacagactccactctccctgactgtgacaccaggagagccggtctctatcagctgcaagtccagtcagagtctgttaaacagtggaaatcaaaagaactacttgacctggtacctgcagaaaccagggcagcctcctcaactgttgatctactgggcatccactagggaatctggggtccctgatcgcttctcaggcagtggatctggaacagatttcactctcaaaatcagccgtgtgcaggctgaagacgtgggagtttattactgtcagaatgattatagttatccgctcacgttcggtcaagggaccaagcttgagatcaaa

SEQ ID NO: 1015 - protein, 119 aa, Artificial Sequence
  hEp 14-G6 H
QVQLVQSGAEVKKPGSSVKVSCKASGYTFSNYWLGWVRQAPGQGLEWMGDIFPGSGNIHYNEKFKGRATITADKSTSTAYMELSSLTSEDTAVYYCARLRNWDEPMDYWGQGTTVTVSS

SEQ ID NO: 1016 - protein, 5 aa, Artificial Sequence
  hEp 14-G6 HCDR1
NYWLG

SEQ ID NO: 1017 - protein, 17 aa, Artificial Sequence
  hEp 14-G6 HCDR2
DIFPGSGNIHYNEKFKG

SEQ ID NO: 1018 - protein, 10 aa, Artificial Sequence
  hEp 14-G6 HCDR3
LRNWDEPMDY

SEQ ID NO: 1019 - DNA, 357 bp, Artificial Sequence
  hEp 14-G6 H
caggtgcagctggtccagtctggagctgaggtgaaaaagcctgggtcttcagtgaaggtatcctgcaaggcttctggatacaccttctctaactactggctaggttgggtaaggcaggcgcctggacagggacttgagtggatgggagatattttccctggaagtggtaatatccactacaatgagaagttcaagggcagagccacaatcactgcagacaaatctacgagcacagcctatatggaactcagtagcctgacatctgaggacactgctgtctattactgtgcaagactgaggaactgggacgagcctatggactactggggccaagggaccacggtcaccgtctcctcc

SEQ ID NO: 1020 - protein, 501 aa, Artificial Sequence
  hEp 14-G6 LH x I2C HL
DIVMTQTPLSLTVTPGEPVSISCKSSQSLLNSGNQKNYLTWYLQKPGQPPQLLIYWASTRESGVPDRFSGSGSGTDFTLKISRVQAEDVGVYYCQNDYSYPLTFGQGTKLEIKGGGGSGGGGSGGGGSQVQLVQSGAEVKKPGSSVKVSCKASGYTFSNYWLGWVRQAPGQGLEWMGDIFPGSGNIHYNEKFKGRATITADKSTSTAYMELSSLTSEDTAVYYCARLRNWDEPMDYWGQGTTVTVSSGGGGSEVQLVESGGGLVQPGGSLKLSCAASGFTFNKYAMNWVRQAPGKGLEWVARIRSKYNNYATYYADSVKDRFTISRDDSKNTAYLQMNNLKTEDTAVYYCVRHGNFGNSYISYWAYWGQGTLVTVSSGGGGSGGGGSGGGGSQTVVTQEPSLTVSPGGTVTLTCGSSTGAVTSGNYPNWVQQKPGQAPRGLIGGTKFLAPGTPARFSGSLLGGKAALTLSGVQPEDEAEYYCVLWYSNRWVFGGGTKLTVL

SEQ ID NO: 1021 - DNA, 1503 bp, Artificial Sequence
  hEp 14-G6 LH x I2C HL
gacatcgtgatgacacagactccactctccctgactgtgacaccaggagagccggtctctatcagctgcaagtccagtcagagtctgttaaacagtggaaatcaaaagaactacttgacctggtacctgcagaaaccagggcagcctcctcaactgttgatctactgggcatccactagggaatctggggtccctgatcgcttctcaggcagtggatctggaacagatttcactctcaaaatcagccgtgtgcaggctgaagacgtgggagtttattactgtcagaatgattatagttatccgctcacgttcggtcaagggaccaagcttgagatcaaaggtggtggtggttctggcggcggcggctccggtggtggtggttctcaggtgcagctggtccagtctggagctgaggtgaaaaagcctgggtcttcagtgaaggtatcctgcaaggcttctggatacaccttctctaactactggctaggttgggtaaggcaggcgcctggacagggacttgagtggatgggagatattttccctggaagtggtaatatccactacaatgagaagttcaagggcagagccacaatcactgcagacaaatctacgagcacagcctatatggaactcagtagcctgacatctgaggacactgctgtctattactgtgcaagactgaggaactgggacgagcctatggactactggggccaagggaccacggtcaccgtctcctccggaggtggtggatccgaggtgcagctggtcgagtctggaggaggattggtgcagcctggagggtcattgaaactctcatgtgcagcctctggattcaccttcaataagtacgccatgaactgggtccgccaggctccaggaaagggtttggaatgggttgctcgcataagaagtaaatataataattatgcaacatattatgccgattcagtgaaagacaggttcaccatctccagagatgattcaaaaaacactgcctatctacaaatgaacaacttgaaaactgaggacactgccgtgtactactgtgtgagacatgggaacttcggtaatagctacatatcctactgggcttactggggccaagggactctggtcaccgtctcctcaggtggtggtggttctggcggcggcggctccggtggtggtggttctcagactgttgtgactcaggaaccttcactcaccgtatcacctggtggaacagtcacactcacttgtggctcctcgactggggctgttacatctggcaactacccaaactgggtccaacaaaaaccaggtcaggcaccccgtggtctaataggtgggactaagttcctcgcccccggtactcctgccagattctcaggctccctgcttggaggcaaggctgccctcaccctctcaggggtacagccagaggatgaggcagaatattactgtgttctatggtacagcaaccgctgggtgttcggtggaggaaccaaactgactgtccta

SEQ ID NO: 1022 - protein, 113 aa, Artificial Sequence
  hEp 14-H4 L
DIVMTQTPLSLPVTPGETASISCKSSQSLLNSGNQKNYLTWYQQKPGQSPQLLIYWASTRESGVPDRFSGSGSGTDFTLKISSVEAEDVGVYYCQNDYSYPLTFGQGTKLEIK

SEQ ID NO: 1023 - protein, 17 aa, Artificial Sequence
  hEp 14-H4 LCDR1
KSSQSLLNSGNQKNYLT

SEQ ID NO: 1024 - protein, 7 aa, Artificial Sequence
  hEp 14-H4 LCDR2
WASTRES

SEQ ID NO: 1025 - protein, 9 aa, Artificial Sequence
  hEp 14-H4 LCDR3
QNDYSYPLT

SEQ ID NO: 1026 - DNA, 339 bp, Artificial Sequence
  hEp 14-H4 L
gacatcgtgatgacacagactccactctccctgcctgtgacaccaggagagacggcctctatcagctgcaagtccagtcagagtctgttaaacagtggaaatcaaaagaactacttgacctggtaccagcagaaaccagggcagtctcctcaactgttgatctactgggcatccactagggaatctggggtccctgatcgcttctcaggcagtggatctggaacagatttcactctcaaaatcagcagtgtggaggctgaagacgtgggagtttattactgtcagaatgattatagttatccgctcacgttcggtcaagggaccaagcttgagatcaaa

SEQ ID NO: 1027 - protein, 119 aa, Artificial Sequence
  hEp 14-H4 H
QVQLVQSGAEVVKPGSSVKVSCKASGYTFSNYWLGWVRQAPGQGLEWMGDIFPGSGNIHYNEKFKGRVTITADKSTSTAYMELSSLTSEDTAVYYCARLRNWDEPMDYWGQGTTVTVSS

SEQ ID NO: 1028 - protein, 5 aa, Artificial Sequence
  hEp 14-H4 HCDR1
NYWLG

SEQ ID NO: 1029 - protein, 17 aa, Artificial Sequence
  hEp 14-H4 HCDR2
DIFPGSGNIHYNEKFKG

SEQ ID NO: 1030 - protein, 10 aa, Artificial Sequence
  hEp 14-H4 HCDR3
LRNWDEPMDY

SEQ ID NO: 1031 - DNA, 357 bp, Artificial Sequence
  hEp 14-H4 H
caggtgcagctggtccagtctggagctgaggtggtaaagcctgggtcttcagtgaaggtatcctgcaaggcttctggatacaccttctctaactactggctaggttgggtaaggcaggcgcctggacagggacttgagtggatgggagatattttccctggaagtggtaatatccactacaatgagaagttcaagggcagagtcacaatcactgcagacaaatctacgagcacagcctatatggaactcagtagcctgacatctgaggacactgctgtctattactgtgcaagactgaggaactgggacgagcctatggactactggggccaagggaccacggtcaccgtctcctcc

SEQ ID NO: 1032 - protein, 501 aa, Artificial Sequence
  hEp 14-H4 LH x I2C HL
DIVMTQTPLSLPVTPGETASISCKSSQSLLNSGNQKNYLTWYQQKPGQSPQLLIYWASTRESGVPDRFSGSGSGTDFTLKISSVEAEDVGVYYCQNDYSYPLTFGQGTKLEIKGGGGSGGGGSGGGGSQVQLVQSGAEVVKPGSSVKVSCKASGYTFSNYWLGWVRQAPGQGLEWMGDIFPGSGNIHYNEKFKGRVTITADKSTSTAYMELSSLTSEDTAVYYCARLRNWDEPMDYWGQGTTVTVSSGGGGSEVQLVESGGGLVQPGGSLKLSCAASGFTFNKYAMNWVRQAPGKGLEWVARIRSKYNNYATYYADSVKDRFTISRDDSKNTAYLQMNNLKTEDTAVYYCVRHGNFGNSYISYWAYWGQGTLVTVSSGGGGSGGGGSGGGGSQTVVTQEPSLTVSPGGTVTLTCGSSTGAVTSGNYPNWVQQKPGQAPRGLIGGTKFLAPGTPARFSGSLLGGKAALTLSGVQPEDEAEYYCVLWYSNRWVFGGGTKLTVL

SEQ ID NO: 1033 - DNA, 1503 bp, Artificial Sequence
  hEp 14-H4 LH x I2C HL
gacatcgtgatgacacagactccactctccctgcctgtgacaccaggagagacggcctctatcagctgcaagtccagtcagagtctgttaaacagtggaaatcaaaagaactacttgacctggtaccagcagaaaccagggcagtctcctcaactgttgatctactgggcatccactagggaatctggggtccctgatcgcttctcaggcagtggatctggaacagatttcactctcaaaatcagcagtgtggaggctgaagacgtgggagtttattactgtcagaatgattatagttatccgctcacgttcggtcaagggaccaagcttgagatcaaaggtggtggtggttctggcggcggcggctccggtggtggtggttctcaggtgcagctggtccagtctggagctgaggtggtaaagcctgggtcttcagtgaaggtatcctgcaaggcttctggatacaccttctctaactactggctaggttgggtaaggcaggcgcctggacagggacttgagtggatgggagatattttccctggaagtggtaatatccactacaatgagaagttcaagggcagagtcacaatcactgcagacaaatctacgagcacagcctatatggaactcagtagcctgacatctgaggacactgctgtctattactgtgcaagactgaggaactgggacgagcctatggactactggggccaagggaccacggtcaccgtctcctccggaggtggtggatccgaggtgcagctggtcgagtctggaggaggattggtgcagcctggagggtcattgaaactctcatgtgcagcctctggattcaccttcaataagtacgccatgaactgggtccgccaggctccaggaaagggtttggaatgggttgctcgcataagaagtaaatataataattatgcaacatattatgccgattcagtgaaagacaggttcaccatctccagagatgattcaaaaaacactgcctatctacaaatgaacaacttgaaaactgaggacactgccgtgtactactgtgtgagacatgggaacttcggtaatagctacatatcctactgggcttactggggccaagggactctggtcaccgtctcctcaggtggtggtggttctggcggcggcggctccggtggtggtggttctcagactgttgtgactcaggaaccttcactcaccgtatcacctggtggaacagtcacactcacttgtggctcctcgactggggctgttacatctggcaactacccaaactgggtccaacaaaaaccaggtcaggcaccccgtggtctaataggtgggactaagttcctcgcccccggtactcctgccagattctcaggctccctgcttggaggcaaggctgccctcaccctctcaggggtacagccagaggatgaggcagaatattactgtgttctatggtacagcaaccgctgggtgttcggtggaggaaccaaactgactgtccta

SEQ ID NO: 1034 - protein, 113 aa, Artificial Sequence
  hEp 17-A6 L
DIVMTQTPLSLTVTPGEPVSISCKSSQSLLNSGNQKNYLTWYLQKPGQPPQLLIYWASTRESGVPDRFSGSGSGTDFTLKISRVEAEDVGVYYCQNDYSYPLTFGQGTKLEIK

SEQ ID NO: 1035 - protein, 17 aa, Artificial Sequence
  hEp 17-A6 LCDR1
KSSQSLLNSGNQKNYLT

SEQ ID NO: 1036 - protein, 7 aa, Artificial Sequence
  hEp 17-A6 LCDR2
WASTRES

SEQ ID NO: 1037 - protein, 9 aa, Artificial Sequence
  hEp 17-A6 LCDR3
QNDYSYPLT

SEQ ID NO: 1038 - DNA, 339 bp, Artificial Sequence
  hEp 17-A6 L
gacatcgtgatgacacagactccactctccctgactgtgacaccaggagagccggtctctatcagctgcaagtccagtcagagtctgttaaacagtggaaatcaaaagaactacttgacctggtacctgcagaaaccagggcagcctcctcaactgttgatctactgggcatccactagggaatctggggtccctgatcgcttctcaggcagtggatctggaacagatttcactctcaaaatcagccgtgtggaggctgaagacgtgggagtttattactgtcagaatgattatagttatccgctcacgttcggtcaagggaccaagcttgagatcaaa

SEQ ID NO: 1039 - protein, 119 aa, Artificial Sequence
  hEp 17-A6 H
QVQLVQSGAEVKRPGSSVKISCKASGYTFSNYWLGWVKQAPGQGLEWMGDIFPGSGNIHYNEKFKGRVTITADKSTSTAYMELSSLTSEDTAVYFCARLRNWDEPMDYWGQGTTVTVSS

SEQ ID NO: 1040 - protein, 5 aa, Artificial Sequence
  hEp 17-A6 HCDR1
NYWLG

SEQ ID NO: 1041 - protein, 17 aa, Artificial Sequence
  hEp 17-A6 HCDR2
DIFPGSGNIHYNEKFKG

SEQ ID NO: 1042 - protein, 10 aa, Artificial Sequence
  hEp 17-A6 HCDR3
LRNWDEPMDY

SEQ ID NO: 1043 - DNA, 357 bp, Artificial Sequence
  hEp 17-A6 H
caggtgcagctggtccagtctggagctgaggtgaaaaggcctgggtcttcagtgaagatatcctgcaaggcttctggatacaccttctctaactactggctaggttgggtaaagcaggcgcctggacagggacttgagtggatgggagatattttccccggaagtggtaatatccactacaatgagaagttcaagggcagagtcacaatcactgcagacaaatctacgagcacagcctatatggaactcagtagcctgacatctgaggacactgctgtctatttctgtgcaagactgaggaactgggacgagcctatggactactggggccaagggaccacggtcaccgtctcctcc

SEQ ID NO: 1044 - protein, 501 aa, Artificial Sequence
  hEp 17-A6 LH x I2C HL
DIVMTQTPLSLTVTPGEPVSISCKSSQSLLNSGNQKNYLTWYLQKPGQPPQLLIYWASTRESGVPDRFSGSGSGTDFTLKISRVEAEDVGVYYCQNDYSYPLTFGQGTKLEIKGGGGSGGGGSGGGGSQVQLVQSGAEVKRPGSSVKISCKASGYTFSNYWLGWVKQAPGQGLEWMGDIFPGSGNIHYNEKFKGRVTITADKSTSTAYMELSSLTSEDTAVYFCARLRNWDEPMDYWGQGTTVTVSSGGGGSEVQLVESGGGLVQPGGSLKLSCAASGFTFNKYAMNWVRQAPGKGLEWVARIRSKYNNYATYYADSVKDRFTISRDDSKNTAYLQMNNLKTEDTAVYYCVRHGNFGNSYISYWAYWGQGTLVTVSSGGGGSGGGGSGGGGSQTVVTQEPSLTVSPGGTVTLTCGSSTGAVTSGNYPNWVQQKPGQAPRGLIGGTKFLAPGTPARFSGSLLGGKAALTLSGVQPEDEAEYYCVLWYSNRWVFGGGTKLTVL

SEQ ID NO: 1045 - DNA, 1503 bp, Artificial Sequence
  hEp 17-A6 LH x I2C HL
gacatcgtgatgacacagactccactctccctgactgtgacaccaggagagccggtctctatcagctgcaagtccagtcagagtctgttaaacagtggaaatcaaaagaactacttgacctggtacctgcagaaaccagggcagcctcctcaactgttgatctactgggcatccactagggaatctggggtccctgatcgcttctcaggcagtggatctggaacagatttcactctcaaaatcagccgtgtggaggctgaagacgtgggagtttattactgtcagaatgattatagttatccgctcacgttcggtcaagggaccaagcttgagatcaaaggtggtggtggttctggcggcggcggctccggtggtggtggttctcaggtgcagctggtccagtctggagctgaggtgaaaaggcctgggtcttcagtgaagatatcctgcaaggcttctggatacaccttctctaactactggctaggttgggtaaagcaggcgcctggacagggacttgagtggatgggagatattttccccggaagtggtaatatccactacaatgagaagttcaagggcagagtcacaatcactgcagacaaatctacgagcacagcctatatggaactcagtagcctgacatctgaggacactgctgtctatttctgtgcaagactgaggaactgggacgagcctatggactactggggccaagggaccacggtcaccgtctcctccggaggtggtggatccgaggtgcagctggtcgagtctggaggaggattggtgcagcctggagggtcattgaaactctcatgtgcagcctctggattcaccttcaataagtacgccatgaactgggtccgccaggctccaggaaagggtttggaatgggttgctcgcataagaagtaaatataataattatgcaacatattatgccgattcagtgaaagacaggttcaccatctccagagatgattcaaaaaacactgcctatctacaaatgaacaacttgaaaactgaggacactgccgtgtactactgtgtgagacatgggaacttcggtaatagctacatatcctactgggcttactggggccaagggactctggtcaccgtctcctcaggtggtggtggttctggcggcggcggctccggtggtggtggttctcagactgttgtgactcaggaaccttcactcaccgtatcacctggtggaacagtcacactcacttgtggctcctcgactggggctgttacatctggcaactacccaaactgggtccaacaaaaaccaggtcaggcaccccgtggtctaataggtgggactaagttcctcgcccccggtactcctgccagattctcaggctccctgcttggaggcaaggctgccctcaccctctcaggggtacagccagaggatgaggcagaatattactgtgttctatggtacagcaaccgctgggtgttcggtggaggaaccaaactgactgtccta

SEQ ID NO: 1046 - protein, 113 aa, Artificial Sequence
  hEp 17-E9 L
DIVMTQTPLSLTVTPGEPVSISCKSSQSLLNSGNQKNYLTWYLQKPGQPPKLLIYWASTRESGVPDRFSGSGSGTDFTLNISRVEAEDVGVYYCQNDYSYPLTFGQGTKLEIK

SEQ ID NO: 1047 - protein, 17 aa, Artificial Sequence
  hEp 17-E9 LCDR1
KSSQSLLNSGNQKNYLT

SEQ ID NO: 1048 - protein, 7 aa, Artificial Sequence
  hEp 17-E9 LCDR2
WASTRES

SEQ ID NO: 1049 - protein, 9 aa, Artificial Sequence
  hEp 17-E9 LCDR3
QNDYSYPLT

SEQ ID NO: 1050 - DNA, 339 bp, Artificial Sequence
  hEp 17-E9 L
gacatcgtgatgacacagactccactctccctgactgtgacaccaggagagccggtctctatcagctgcaagtccagtcagagtctgttaaacagtggaaatcaaaagaactacttgacctggtacctgcagaaaccagggcagcctcctaaactgttgatctactgggcatccactagggaatctggggtccctgatcgcttctcaggcagtggatctggaacagatttcactctcaacatcagccgtgtggaggctgaagacgtgggagtttattactgtcagaatgattatagttatccgctcacgttcggtcaagggaccaagcttgagatcaaa

SEQ ID NO: 1051 - protein, 119 aa, Artificial Sequence
  hEp 17-E9 H
QVQLVQSGAEVKKPGSSVKVSCKASGYTFSNYWLGWVKQAPGHGLEWMGDIFPGSGNIHYNEKFKGRVTITADKSTSTAYMELSSLRSEDTAVYYCARLRNWDEPMDYWGQGTTVTVSS

SEQ ID NO: 1052 - protein, 5 aa, Artificial Sequence
  hEp 17-E9 HCDR1
NYWLG

SEQ ID NO: 1053 - protein, 17 aa, Artificial Sequence
  hEp 17-E9 HCDR2
DIFPGSGNIHYNEKFKG

SEQ ID NO: 1054 - protein, 10 aa, Artificial Sequence
  hEp 17-E9 HCDR3
LRNWDEPMDY

SEQ ID NO: 1055 - DNA, 357 bp, Artificial Sequence
  hEp 17-E9 H
caggtgcagctggtccagtctggagctgaggtgaaaaagcctgggtcttcagtgaaggtatcctgcaaggcttctggatacaccttctctaactactggctaggttgggtaaagcaggcgcctggacatggacttgagtggatgggagatattttccctggaagtggtaatatccactacaatgagaagttcaagggcagagtcacaatcactgcagacaaatctacgagcacagcctatatggaactcagtagcctgagatctgaggacactgctgtctattactgtgcaagactgaggaactgggacgagcctatggactactggggccaagggaccacggtcaccgtctcctcc

SEQ ID NO: 1056 - protein, 501 aa, Artificial Sequence
  hEp 17-E9 LH x I2C HL
DIVMTQTPLSLTVTPGEPVSISCKSSQSLLNSGNQKNYLTWYLQKPGQPPKLLIYWASTRESGVPDRFSGSGSGTDFTLNISRVEAEDVGVYYCQNDYSYPLTFGQGTKLEIKGGGGSGGGGSGGGGSQVQLVQSGAEVKKPGSSVKVSCKASGYTFSNYWLGWVKQAPGHGLEWMGDIFPGSGNIHYNEKFKGRVTITADKSTSTAYMELSSLRSEDTAVYYCARLRNWDEPMDYWGQGTTVTVSSGGGGSEVQLVESGGGLVQPGGSLKLSCAASGFTFNKYAMNWVRQAPGKGLEWVARIRSKYNNYATYYADSVKDRFTISRDDSKNTAYLQMNNLKTEDTAVYYCVRHGNFGNSYISYWAYWGQGTLVTVSSGGGGSGGGGSGGGGSQTVVTQEPSLTVSPGGTVTLTCGSSTGAVTSGNYPNWVQQKPGQAPRGLIGGTKFLAPGTPARFSGSLLGGKAALTLSGVQPEDEAEYYCVLWYSNRWVFGGGTKLTVL

SEQ ID NO: 1057 - DNA, 1503 bp, Artificial Sequence
  hEp 17-E9 LH x I2C HL
gacatcgtgatgacacagactccactctccctgactgtgacaccaggagagccggtctctatcagctgcaagtccagtcagagtctgttaaacagtggaaatcaaaagaactacttgacctggtacctgcagaaaccagggcagcctcctaaactgttgatctactgggcatccactagggaatctggggtccctgatcgcttctcaggcagtggatctggaacagatttcactctcaacatcagccgtgtggaggctgaagacgtgggagtttattactgtcagaatgattatagttatccgctcacgttcggtcaagggaccaagcttgagatcaaaggtggtggtggttctggcggcggcggctccggtggtggtggttctcaggtgcagctggtccagtctggagctgaggtgaaaaagcctgggtcttcagtgaaggtatcctgcaaggcttctggatacaccttctctaactactggctaggttgggtaaagcaggcgcctggacatggacttgagtggatgggagatattttccctggaagtggtaatatccactacaatgagaagttcaagggcagagtcacaatcactgcagacaaatctacgagcacagcctatatggaactcagtagcctgagatctgaggacactgctgtctattactgtgcaagactgaggaactgggacgagcctatggactactggggccaagggaccacggtcaccgtctcctccggaggtggtggatccgaggtgcagctggtcgagtctggaggaggattggtgcagcctggagggtcattgaaactctcatgtgcagcctctggattcaccttcaataagtacgccatgaactgggtccgccaggctccaggaaagggtttggaatgggttgctcgcataagaagtaaatataataattatgcaacatattatgccgattcagtgaaagacaggttcaccatctccagagatgattcaaaaaacactgcctatctacaaatgaacaacttgaaaactgaggacactgccgtgtactactgtgtgagacatgggaacttcggtaatagctacatatcctactgggcttactggggccaagggactctggtcaccgtctcctcaggtggtggtggttctggcggcggcggctccggtggtggtggttctcagactgttgtgactcaggaaccttcactcaccgtatcacctggtggaacagtcacactcacttgtggctcctcgactggggctgttacatctggcaactacccaaactgggtccaacaaaaaccaggtcaggcaccccgtggtctaataggtgggactaagttcctcgcccccggtactcctgccagattctcaggctccctgcttggaggcaaggctgccctcaccctctcaggggtacagccagaggatgaggcagaatattactgtgttctatggtacagcaaccgctgggtgttcggtggaggaaccaaactgactgtccta

SEQ ID NO: 1058 - protein, 113 aa, Artificial Sequence
  hEp 18-A6 L
DIVMTQTPLSLPVTPGEQVSMSCKSSQSLLNSGNQKNYLTWYLQKPGQSPQLLIYWASTRESGVPDRFSGSGSGTDFTLNISSVEAEDVGVYYCQNDYSYPLTFGQGTKLEIK

SEQ ID NO: 1059 - protein, 17 aa, Artificial Sequence
  hEp 18-A6 LCDR1
KSSQSLLNSGNQKNYLT

SEQ ID NO: 1060 - protein, 7 aa, Artificial Sequence
  hEp 18-A6 LCDR2
WASTRES

SEQ ID NO: 1061 - protein, 9 aa, Artificial Sequence
  hEp 18-A6 LCDR3
QNDYSYPLT

SEQ ID NO: 1062 - DNA, 339 bp, Artificial Sequence
  hEp 18-A6 L
gacatcgtgatgacacagactccactctccctgcctgtgacaccaggagagcaggtctctatgagctgcaagtccagtcagagtctgttaaacagtggaaatcaaaagaactacttgacctggtacctgcagaaaccagggcagtctcctcaactgttgatctactgggcatccactagggaatctggggtccctgatcgcttctcaggcagtggatctggaacagatttcactctcaacatcagcagtgtggaggctgaagacgtgggagtttattactgtcagaatgattatagttatccgctcacgttcggtcaagggaccaagcttgagatcaaa

SEQ ID NO: 1063 - protein, 119 aa, Artificial Sequence
  hEp 18-A6 H
QVQLVQSGAEVKKPGSSVKVSCKASGYTFSNYWLGWVRQTPGQGLEWMGDIFPGSGNIHYNEKFKGRVTITADKSTSTAYMELSSLTSEDTAVYYCARLRNWDEPMDYWGQGTTVTVSS

SEQ ID NO: 1064 - protein, 5 aa, Artificial Sequence
  hEp 18-A6 HCDR1
NYWLG

SEQ ID NO: 1065 - protein, 17 aa, Artificial Sequence
  hEp 18-A6 HCDR2
DIFPGSGNIHYNEKFKG

SEQ ID NO: 1066 - protein, 10 aa, Artificial Sequence
  hEp 18-A6 HCDR3
LRNWDEPMDY

SEQ ID NO: 1067 - DNA, 357 bp, Artificial Sequence
  hEp 18-A6 H
caggtgcagctggtccagtctggagctgaggtgaaaaagcctgggtcttcagtgaaggtatcctgcaaggcttctggatacaccttctctaactactggctaggttgggtaaggcagacgcctggacagggacttgagtggatgggagatattttccctggaagtggtaatatccactacaatgagaagttcaagggcagagtcacaatcactgcagacaaatctacgagcacagcctatatggaactcagtagcctgacatctgaggacactgctgtctattactgtgcaagactgaggaactgggacgagcctatggactactggggccaagggaccacggtcaccgtctcctcc

SEQ ID NO: 1068 - protein, 113 aa, Artificial Sequence
  hEp 18-E3 L
DIVMTQTPLSLPVTPGEPVSISCKSSQSLLNSGNQKNYLTWYLQKPGQPPQLLIYWASTRESGVPDRFSGSGSGTDFTLTISSVQAEDVGVYYCQNDYSYPLTFGQGTKLEIK

SEQ ID NO: 1069 - protein, 17 aa, Artificial Sequence
  hEp 18-E3 LCDR1
KSSQSLLNSGNQKNYLT

SEQ ID NO: 1070 - protein, 7 aa, Artificial Sequence
  hEp 18-E3 LCDR2
WASTRES

SEQ ID NO: 1071 - protein, 9 aa, Artificial Sequence
  hEp 18-E3 LCDR3
QNDYSYPLT

SEQ ID NO: 1072 - DNA, 339 bp, Artificial Sequence
  hEp 18-E3 L
gacatcgtgatgacacagactccactctccctgcctgtgacaccaggagagccggtctctatcagctgcaagtccagtcagagtctgttaaacagtggaaatcaaaagaactacttgacctggtacctgcagaaaccagggcagcctcctcaactgttgatctactgggcatccactagggaatctggggtccctgatcgcttctcaggcagtggatctggaacagatttcactctcaccatcagcagtgtgcaggctgaagacgtgggagtttattactgtcagaatgattatagttatccgctcacgttcggtcaagggaccaagcttgagatcaaa

SEQ ID NO: 1073 - protein, 119 aa, Artificial Sequence
  hEp 18-E3 H
QVQLVQSGAELVRPGSSVKISCKASGYAFSNYWLGWVRQAPGQGLEWMGDIFPGSGNIHYNEKFKGRVTLTADKSTSTAYMQLSSLTSEDTAVYYCARLRNWDEPMDYWGQGTTVTVSS

SEQ ID NO: 1074 - protein, 5 aa, Artificial Sequence
  hEp 18-E3 HCDR1
NYWLG

SEQ ID NO: 1075 - protein, 17 aa, Artificial Sequence
  hEp 18-E3 HCDR2
DIFPGSGNIHYNEKFKG

SEQ ID NO: 1076 - protein, 10 aa, Artificial Sequence
  hEp 18-E3 HCDR3
LRNWDEPMDY

SEQ ID NO: 1077 - DNA, 357 bp, Artificial Sequence
  hEp 18-E3 H
caggtgcagctggtccagtctggagctgagctggtaaggcctgggtcttcagtgaagatatcctgcaaggcttctggatacgccttctctaactactggctaggttgggtaaggcaggcgcctggacagggacttgagtggatgggagatattttccctggaagtggtaatatccactacaatgagaagttcaagggcagagtcacactcactgcagacaaatctacgagcacagcctatatgcaactcagtagcctgacatctgaggacactgctgtctattactgtgcaagactgaggaactgggacgagcctatggactactggggccaagggaccacggtcaccgtctcctcc

SEQ ID NO: 1078 - protein, 501 aa, Artificial Sequence
  hEp 18-E3 LH x I2C HL
DIVMTQTPLSLPVTPGEPVSISCKSSQSLLNSGNQKNYLTWYLQKPGQPPQLLIYWASTRESGVPDRFSGSGSGTDFTLTISSVQAEDVGVYYCQNDYSYPLTFGQGTKLEIKGGGGSGGGGSGGGGSQVQLVQSGAELVRPGSSVKISCKASGYAFSNYWLGWVRQAPGQGLEWMGDIFPGSGNIHYNEKFKGRVTLTADKSTSTAYMQLSSLTSEDTAVYYCARLRNWDEPMDYWGQGTTVTVSSGGGGSEVQLVESGGGLVQPGGSLKLSCAASGFTFNKYAMNWVRQAPGKGLEWVARIRSKYNNYATYYADSVKDRFTISRDDSKNTAYLQMNNLKTEDTAVYYCVRHGNFGNSYISYWAYWGQGTLVTVSSGGGGSGGGGSGGGGSQTVVTQEPSLTVSPGGTVTLTCGSSTGAVTSGNYPNWVQQKPGQAPRGLIGGTKFLAPGTPARFSGSLLGGKAALTLSGVQPEDEAEYYCVLWYSNRWVFGGGTKLTVL

SEQ ID NO: 1079 - DNA, 1503 bp, Artificial Sequence
  hEp 18-E3 LH x I2C HL
gacatcgtgatgacacagactccactctccctgcctgtgacaccaggagagccggtctctatcagctgcaagtccagtcagagtctgttaaacagtggaaatcaaaagaactacttgacctggtacctgcagaaaccagggcagcctcctcaactgttgatctactgggcatccactagggaatctggggtccctgatcgcttctcaggcagtggatctggaacagatttcactctcaccatcagcagtgtgcaggctgaagacgtgggagtttattactgtcagaatgattatagttatccgctcacgttcggtcaagggaccaagcttgagatcaaaggtggtggtggttctggcggcggcggctccggtggtggtggttctcaggtgcagctggtccagtctggagctgagctggtaaggcctgggtcttcagtgaagatatcctgcaaggcttctggatacgccttctctaactactggctaggttgggtaaggcaggcgcctggacagggacttgagtggatgggagatattttccctggaagtggtaatatccactacaatgagaagttcaagggcagagtcacactcactgcagacaaatctacgagcacagcctatatgcaactcagtagcctgacatctgaggacactgctgtctattactgtgcaagactgaggaactgggacgagcctatggactactggggccaagggaccacggtcaccgtctcctccggaggtggtggatccgaggtgcagctggtcgagtctggaggaggattggtgcagcctggagggtcattgaaactctcatgtgcagcctctggattcaccttcaataagtacgccatgaactgggtccgccaggctccaggaaagggtttggaatgggttgctcgcataagaagtaaatataataattatgcaacatattatgccgattcagtgaaagacaggttcaccatctccagagatgattcaaaaaacactgcctatctacaaatgaacaacttgaaaactgaggacactgccgtgtactactgtgtgagacatgggaacttcggtaatagctacatatcctactgggcttactggggccaagggactctggtcaccgtctcctcaggtggtggtggttctggcggcggcggctccggtggtggtggttctcagactgttgtgactcaggaaccttcactcaccgtatcacctggtggaacagtcacactcacttgtggctcctcgactggggctgttacatctggcaactacccaaactgggtccaacaaaaaccaggtcaggcaccccgtggtctaataggtgggactaagttcctcgcccccggtactcctgccagattctcaggctccctgcttggaggcaaggctgccctcaccctctcaggggtacagccagaggatgaggcagaatattactgtgttctatggtacagcaaccgctgggtgttcggtggaggaaccaaactgactgtccta

SEQ ID NO: 1080 - protein, 113 aa, Artificial Sequence
  hEp 18-F11 L
DIVMTQTPPSLTVTAGEPVSISCKSSQSLLNSGNQKNYLTWYLQKPGQSPQLLIYWASTRESGVPDRFSGSGSGTDFTLKISSVQAEDVGVYYCQNDYSYPLTFGQGTKLEIK

SEQ ID NO: 1081 - protein, 17 aa, Artificial Sequence
  hEp 18-F11 LCDR1
KSSQSLLNSGNQKNYLT

SEQ ID NO: 1082 - protein, 7 aa, Artificial Sequence
  hEp 18-F11 LCDR2
WASTRES

SEQ ID NO: 1083 - protein, 9 aa, Artificial Sequence
  hEp 18-F11 LCDR3
QNDYSYPLT

SEQ ID NO: 1084 - DNA, 339 bp, Artificial Sequence
  hEp 18-F11 L
gacatcgtgatgacacagactccaccctccctgactgtgacagcaggagagccggtctctatcagctgcaagtccagtcagagtctgttaaacagtggaaatcaaaagaactacttgacctggtacctgcagaaaccagggcagtctcctcaactgttgatctactgggcatccactagggaatctggggtccctgatcgcttctcaggcagtggatctggaacagatttcactctcaaaatcagcagtgtgcaggctgaagacgtgggagtttattactgtcagaatgattatagttatccgctcacgttcggtcaagggaccaagcttgagatcaaa

SEQ ID NO: 1085 - protein, 119 aa, Artificial Sequence
  hEp 18-F11 H
QVQLVQSGAEVKRPGSSVKVSCKASGYTFSNYWLGWVRQAPGQGLEWIGDIFPGSGNIHYNEKFKGRVTITADKSTSTAYMELSSLRFEDTAVYYCARLRNWDEPMDYWGQGTTVTVSS

SEQ ID NO: 1086 - protein, 5 aa, Artificial Sequence
  hEp 18-F11 HCDR1
NYWLG

SEQ ID NO: 1087 - protein, 17 aa, Artificial Sequence
  hEp 18-F11 HCDR2
DIFPGSGNIHYNEKFKG

SEQ ID NO: 1088 - protein, 10 aa, Artificial Sequence
  hEp 18-F11 HCDR3
LRNWDEPMDY

SEQ ID NO: 1089 - DNA, 357 bp, Artificial Sequence
  hEp 18-F11 H
caggtgcagctggtccagtctggagctgaggtgaaaaggcctgggtcttcagtgaaggtatcctgcaaggcttctggatacaccttctctaactactggctaggttgggtaaggcaggcgcctggacagggacttgagtggattggagatattttccctggaagtggtaatatccactacaatgagaagttcaagggcagagtcacaatcactgcagacaaatctacgagcacagcctatatggaactcagtagcctgagatttgaggacactgctgtctattactgtgcaagactgaggaactgggacgagcctatggactactggggccaagggaccacggtcaccgtctcctcc

SEQ ID NO: 1090 - protein, 501 aa, Artificial Sequence
  hEp 18-F11 LH x I2C HL
DIVMTQTPPSLTVTAGEPVSISCKSSQSLLNSGNQKNYLTWYLQKPGQSPQLLIYWASTRESGVPDRFSGSGSGTDFTLKISSVQAEDVGVYYCQNDYSYPLTFGQGTKLEIKGGGGSGGGGSGGGGSQVQLVQSGAEVKRPGSSVKVSCKASGYTFSNYWLGWVRQAPGQGLEWIGDIFPGSGNIHYNEKFKGRVTITADKSTSTAYMELSSLRFEDTAVYYCARLRNWDEPMDYWGQGTTVTVSSGGGGSEVQLVESGGGLVQPGGSLKLSCAASGFTFNKYAMNWVRQAPGKGLEWVARIRSKYNNYATYYADSVKDRFTISRDDSKNTAYLQMNNLKTEDTAVYYCVRHGNFGNSYISYWAYWGQGTLVTVSSGGGGSGGGGSGGGGSQTVVTQEPSLTVSPGGTVTLTCGSSTGAVTSGNYPNWVQQKPGQAPRGLIGGTKFLAPGTPARFSGSLLGGKAALTLSGVQPEDEAEYYCVLWYSNRWVFGGGTKLTVL

SEQ ID NO: 1091 - DNA, 1503 bp, Artificial Sequence
  hEp 18-F11 LH x I2C HL
gacatcgtgatgacacagactccaccctccctgactgtgacagcaggagagccggtctctatcagctgcaagtccagtcagagtctgttaaacagtggaaatcaaaagaactacttgacctggtacctgcagaaaccagggcagtctcctcaactgttgatctactgggcatccactagggaatctggggtccctgatcgcttctcaggcagtggatctggaacagatttcactctcaaaatcagcagtgtgcaggctgaagacgtgggagtttattactgtcagaatgattatagttatccgctcacgttcggtcaagggaccaagcttgagatcaaaggtggtggtggttctggcggcggcggctccggtggtggtggttctcaggtgcagctggtccagtctggagctgaggtgaaaaggcctgggtcttcagtgaaggtatcctgcaaggcttctggatacaccttctctaactactggctaggttgggtaaggcaggcgcctggacagggacttgagtggattggagatattttccctggaagtggtaatatccactacaatgagaagttcaagggcagagtcacaatcactgcagacaaatctacgagcacagcctatatggaactcagtagcctgagatttgaggacactgctgtctattactgtgcaagactgaggaactgggacgagcctatggactactggggccaagggaccacggtcaccgtctcctccggaggtggtggatccgaggtgcagctggtcgagtctggaggaggattggtgcagcctggagggtcattgaaactctcatgtgcagcctctggattcaccttcaataagtacgccatgaactgggtccgccaggctccaggaaagggtttggaatgggttgctcgcataagaagtaaatataataattatgcaacatattatgccgattcagtgaaagacaggttcaccatctccagagatgattcaaaaaacactgcctatctacaaatgaacaacttgaaaactgaggacactgccgtgtactactgtgtgagacatgggaacttcggtaatagctacatatcctactgggcttactggggccaagggactctggtcaccgtctcctcaggtggtggtggttctggcggcggcggctccggtggtggtggttctcagactgttgtgactcaggaaccttcactcaccgtatcacctggtggaacagtcacactcacttgtggctcctcgactggggctgttacatctggcaactacccaaactgggtccaacaaaaaccaggtcaggcaccccgtggtctaataggtgggactaagttcctcgcccccggtactcctgccagattctcaggctccctgcttggaggcaaggctgccctcaccctctcaggggtacagccagaggatgaggcagaatattactgtgttctatggtacagcaaccgctgggtgttcggtggaggaaccaaactgactgtccta

SEQ ID NO: 1092 - protein, 113 aa, Artificial Sequence
  hEp 18-F12 L
DIVMTQTPLSLTVTPGEPVSISCKSSQSLLNSGNQKNYLTWYLQKPGQPPQLLIYWASTRESGVPDRFSGSGSGTDFTLTISRVEAEDVGVYYCQNDYSYPLTFGQGTKLEIK

SEQ ID NO: 1093 - protein, 17 aa, Artificial Sequence
  hEp 18-F12 LCDR1
KSSQSLLNSGNQKNYLT

SEQ ID NO: 1094 - protein, 7 aa, Artificial Sequence
  hEp 18-F12 LCDR2
WASTRES

SEQ ID NO: 1095 - protein, 9 aa, Artificial Sequence
  hEp 18-F12 LCDR3
QNDYSYPLT

SEQ ID NO: 1096 - DNA, 339 bp, Artificial Sequence
  hEp 18-F12 L
gacatcgtgatgacacagactccactctccctgactgtgacaccaggagagccggtctctatcagctgcaagtccagtcagagtctgttaaacagtggaaatcaaaagaactacttgacctggtacctgcagaaaccagggcagcctcctcaactgttgatctactgggcatccactagggaatctggggtccctgatcgcttctcaggcagtggatctggaacagatttcactctcacaatcagccgtgtggaggctgaagacgtgggagtttattactgtcagaatgattatagttatccgctcacgttcggtcaagggaccaagcttgagatcaaa

SEQ ID NO: 1097 - protein, 119 aa, Artificial Sequence
  hEp 18-F12 H
QVQLVQSGAEVKKPGSSVKVSCKASGYTFSNYWLGWVRQRPGQGLEWIGDIFPGSGNIHYNEKFKGRATITADKSTSTAYMELSSLRSEDTAVYYCARLRNWDEPMDYWGQGTTVTVSS

SEQ ID NO: 1098 - protein, 5 aa, Artificial Sequence
  hEp 18-F12 HCDR1
NYWLG

SEQ ID NO: 1099 - protein, 17 aa, Artificial Sequence
  hEp 18-F12 HCDR2
DIFPGSGNIHYNEKFKG

SEQ ID NO: 1100 - protein, 10 aa, Artificial Sequence
  hEp 18-F12 HCDR3
LRNWDEPMDY

SEQ ID NO: 1101 - DNA, 357 bp, Artificial Sequence
  hEp 18-F12 L
caggtgcagctggtccagtctggagctgaggtgaaaaagcctgggtcttcagtgaaggtatcctgcaaggcttctggatacaccttctctaactactggctaggttgggtaaggcagaggcctggacagggacttgagtggattggagatattttccctggaagtggtaatatccactacaatgagaagttcaagggcagagccacaatcactgcagacaaatctacgagcacagcctatatggaactcagtagcctgagatctgaggacactgctgtctattactgtgcaagactgaggaactgggacgagcctatggactactggggccaagggaccacggtcaccgtctcctcc

SEQ ID NO: 1102 - protein, 501 aa, Artificial Sequence
  hEp 18-F12 LH x I2C HL
DIVMTQTPLSLTVTPGEPVSISCKSSQSLLNSGNQKNYLTWYLQKPGQPPQLLIYWASTRESGVPDRFSGSGSGTDFTLTISRVEAEDVGVYYCQNDYSYPLTFGQGTKLEIKGGGGSGGGGSGGGGSQVQLVQSGAEVKKPGSSVKVSCKASGYTFSNYWLGWVRQRPGQGLEWIGDIFPGSGNIHYNEKFKGRATITADKSTSTAYMELSSLRSEDTAVYYCARLRNWDEPMDYWGQGTTVTVSSGGGGSEVQLVESGGGLVQPGGSLKLSCAASGFTFNKYAMNWVRQAPGKGLEWVARIRSKYNNYATYYADSVKDRFTISRDDSKNTAYLQMNNLKTEDTAVYYCVRHGNFGNSYISYWAYWGQGTLVTVSSGGGGSGGGGSGGGGSQTVVTQEPSLTVSPGGTVTLTCGSSTGAVTSGNYPNWVQQKPGQAPRGLIGGTKFLAPGTPARFSGSLLGGKAALTLSGVQPEDEAEYYCVLWYSNRWVFGGGTKLTVL

SEQ ID NO: 1103 - DNA, 1503 bp, Artificial Sequence
  hEp 18-F12 LH x I2C HL
gacatcgtgatgacacagactccactctccctgactgtgacaccaggagagccggtctctatcagctgcaagtccagtcagagtctgttaaacagtggaaatcaaaagaactacttgacctggtacctgcagaaaccagggcagcctcctcaactgttgatctactgggcatccactagggaatctggggtccctgatcgcttctcaggcagtggatctggaacagatttcactctcacaatcagccgtgtggaggctgaagacgtgggagtttattactgtcagaatgattatagttatccgctcacgttcggtcaagggaccaagcttgagatcaaaggtggtggtggttctggcggcggcggctccggtggtggtggttctcaggtgcagctggtccagtctggagctgaggtgaaaaagcctgggtcttcagtgaaggtatcctgcaaggcttctggatacaccttctctaactactggctaggttgggtaaggcagaggcctggacagggacttgagtggattggagatattttccctggaagtggtaatatccactacaatgagaagttcaagggcagagccacaatcactgcagacaaatctacgagcacagcctatatggaactcagtagcctgagatctgaggacactgctgtctattactgtgcaagactgaggaactgggacgagcctatggactactggggccaagggaccacggtcaccgtctcctccggaggtggtggatccgaggtgcagctggtcgagtctggaggaggattggtgcagcctggagggtcattgaaactctcatgtgcagcctctggattcaccttcaataagtacgccatgaactgggtccgccaggctccaggaaagggtttggaatgggttgctcgcataagaagtaaatataataattatgcaacatattatgccgattcagtgaaagacaggttcaccatctccagagatgattcaaaaaacactgcctatctacaaatgaacaacttgaaaactgaggacactgccgtgtactactgtgtgagacatgggaacttcggtaatagctacatatcctactgggcttactggggccaagggactctggtcaccgtctcctcaggtggtggtggttctggcggcggcggctccggtggtggtggttctcagactgttgtgactcaggaaccttcactcaccgtatcacctggtggaacagtcacactcacttgtggctcctcgactggggctgttacatctggcaactacccaaactgggtccaacaaaaaccaggtcaggcaccccgtggtctaataggtgggactaagttcctcgcccccggtactcctgccagattctcaggctccctgcttggaggcaaggctgccctcaccctctcaggggtacagccagaggatgaggcagaatattactgtgttctatggtacagcaaccgctgggtgttcggtggaggaaccaaactgactgtccta

SEQ ID NO: 1104 - protein, 113 aa, Artificial Sequence
  hEp 18-G1 L
DIVMTQTPLSLTVTPGETVSISCKSSQSLLNSGNQKNYLTWYLQKPGQSPQLLIYWASTRESGVPDRFSGSGSGTDFTLTISSVEAEDVGVYYCQNDYSYPLTFGQGTKLEIK

SEQ ID NO: 1105 - protein, 17 aa, Artificial Sequence
  hEp 18-G1 LCDR1
KSSQSLLNSGNQKNYLT

SEQ ID NO: 1106 - protein, 7 aa, Artificial Sequence
  hEp 18-G1 LCDR2
WASTRES

SEQ ID NO: 1107 - protein, 9 aa, Artificial Sequence
  hEp 18-G1 LCDR3
QNDYSYPLT

SEQ ID NO: 1108 - DNA, 339 bp, Artificial Sequence
  hEp 18-G1 L
gacatcgtgatgacacagactccactctccctgactgtgacaccaggagagacggtctctatcagctgcaagtccagtcagagtctgttaaacagtggaaatcaaaagaactacttgacctggtacctgcagaaaccagggcagtctcctcaactgttgatctactgggcatccactagggaatctggggtccctgatcgcttctcaggcagtggatctggaacagatttcactctcacaatcagcagtgtggaggctgaagacgtgggagtttattactgtcagaatgattatagttatccgctcacgttcggtcaagggaccaagcttgagatcaaa

SEQ ID NO: 1109 - protein, 119 aa, Artificial Sequence
  hEp 18-G1 H
QVQLVQSGAEVVKPGSSVKVSCKASGYTFSNYWLGWVRQTPGQGLEWIGDIFPGSGNIHYNEKFKGKVTITADKSTSTAYMELSSLGSEDTAVYYCARLRNWDEPMDYWGQGTTVTVSS

SEQ ID NO: 1110 - protein, 5 aa, Artificial Sequence
  hEp 18-G1 HCDR1
NYWLG

SEQ ID NO: 1111 - protein, 17 aa, Artificial Sequence
  hEp 18-G1 HCDR2
DIFPGSGNIHYNEKFKG

SEQ ID NO: 1112 - protein, 10 aa, Artificial Sequence
  hEp 18-G1 HCDR3
LRNWDEPMDY

SEQ ID NO: 1113 - DNA, 357 bp, Artificial Sequence
  hEp 18-G1 H
caggtgcagctggtccagtctggagctgaggtggtaaagcctgggtcttcagtgaaggtatcctgcaaggcttctggatacaccttctctaactactggctaggttgggtaaggcagacgcctggacagggacttgagtggattggagatattttccctggaagtggtaatatccactacaatgagaagttcaagggcaaagtcacaatcactgcagacaaatctacgagcacagcctatatggaactcagtagcctgggatctgaggacactgctgtctattactgtgcaagactgaggaactgggacgagcctatggactactggggccaagggaccacggtcaccgtctcctcc

SEQ ID NO: 1114 - protein, 501 aa, Artificial Sequence
  hEp 18-G1 LH x I2C HL
DIVMTQTPLSLTVTPGETVSISCKSSQSLLNSGNQKNYLTWYLQKPGQSPQLLIYWASTRESGVPDRFSGSGSGTDFTLTISSVEAEDVGVYYCQNDYSYPLTFGQGTKLEIKGGGGSGGGGSGGGGSQVQLVQSGAEVVKPGSSVKVSCKASGYTFSNYWLGWVRQTPGQGLEWIGDIFPGSGNIHYNEKFKGKVTITADKSTSTAYMELSSLGSEDTAVYYCARLRNWDEPMDYWGQGTTVTVSSGGGGSEVQLVESGGGLVQPGGSLKLSCAASGFTFNKYAMNWVRQAPGKGLEWVARIRSKYNNYATYYADSVKDRFTISRDDSKNTAYLQMNNLKTEDTAVYYCVRHGNFGNSYISYWAYWGQGTLVTVSSGGGGSGGGGSGGGGSQTVVTQEPSLTVSPGGTVTLTCGSSTGAVTSGNYPNWVQQKPGQAPRGLIGGTKFLAPGTPARFSGSLLGGKAALTLSGVQPEDEAEYYCVLWYSNRWVFGGGTKLTVL

SEQ ID NO: 1115 - DNA, 1503 bp, Artificial Sequence
  hEp 18-G1 LH x I2C HL
gacatcgtgatgacacagactccactctccctgactgtgacaccaggagagacggtctctatcagctgcaagtccagtcagagtctgttaaacagtggaaatcaaaagaactacttgacctggtacctgcagaaaccagggcagtctcctcaactgttgatctactgggcatccactagggaatctggggtccctgatcgcttctcaggcagtggatctggaacagatttcactctcacaatcagcagtgtggaggctgaagacgtgggagtttattactgtcagaatgattatagttatccgctcacgttcggtcaagggaccaagcttgagatcaaaggtggtggtggttctggcggcggcggctccggtggtggtggttctcaggtgcagctggtccagtctggagctgaggtggtaaagcctgggtcttcagtgaaggtatcctgcaaggcttctggatacaccttctctaactactggctaggttgggtaaggcagacgcctggacagggacttgagtggattggagatattttccctggaagtggtaatatccactacaatgagaagttcaagggcaaagtcacaatcactgcagacaaatctacgagcacagcctatatggaactcagtagcctgggatctgaggacactgctgtctattactgtgcaagactgaggaactgggacgagcctatggactactggggccaagggaccacggtcaccgtctcctccggaggtggtggatccgaggtgcagctggtcgagtctggaggaggattggtgcagcctggagggtcattgaaactctcatgtgcagcctctggattcaccttcaataagtacgccatgaactgggtccgccaggctccaggaaagggtttggaatgggttgctcgcataagaagtaaatataataattatgcaacatattatgccgattcagtgaaagacaggttcaccatctccagagatgattcaaaaaacactgcctatctacaaatgaacaacttgaaaactgaggacactgccgtgtactactgtgtgagacatgggaacttcggtaatagctacatatcctactgggcttactggggccaagggactctggtcaccgtctcctcaggtggtggtggttctggcggcggcggctccggtggtggtggttctcagactgttgtgactcaggaaccttcactcaccgtatcacctggtggaacagtcacactcacttgtggctcctcgactggggctgttacatctggcaactacccaaactgggtccaacaaaaaccaggtcaggcaccccgtggtctaataggtgggactaagttcctcgcccccggtactcctgccagattctcaggctccctgcttggaggcaaggctgccctcaccctctcaggggtacagccagaggatgaggcagaatattactgtgttctatggtacagcaaccgctgggtgttcggtggaggaaccaaactgactgtccta

SEQ ID NO: 1116 - protein, 113 aa, Artificial Sequence
  hEp 18-G9 L
DIVMTQTPLSLTVTPGEPVSISCKSSQSLLNSGNQKNYLTWYLQKPGQSPQLLIYWASTRESGVPDRFSGSGSGTDFTLKISRVEAEDVGVYYCQNDYSYPLTFGQGTKLEIK

SEQ ID NO: 1117 - protein, 17 aa, Artificial Sequence
  hEp 18-G9 LCDR1
KSSQSLLNSGNQKNYLT

SEQ ID NO: 1118 - protein, 7 aa, Artificial Sequence
  hEp 18-G9 LCDR2
WASTRES

SEQ ID NO: 1119 - protein, 9 aa, Artificial Sequence
  hEp 18-G9 LCDR3
QNDYSYPLT

SEQ ID NO: 1120 - DNA, 339 bp, Artificial Sequence
  hEp 18-G9 L
gacatcgtgatgacacagactccactctccctgactgtgacaccaggagagccggtctctatcagctgcaagtccagtcagagtctgttaaacagtggaaatcaaaagaactacttgacctggtacctgcagaaaccagggcagtctcctcaactgttgatctactgggcatccactagggaatctggggtccctgatcgcttctcaggcagtggatctggaacagatttcactctcaaaatcagccgtgtggaggctgaagacgtgggagtttattactgtcagaatgattatagttatccgctcacgttcggtcaagggaccaagcttgagatcaaa

SEQ ID NO: 1121 - protein, 119 aa, Artificial Sequence
  hEp 18-G9 H
QVQLVQSGAEVKKPGSSVKVSCKASGYTFSNYWLGWVRQTPGQGLEWMGDIFPGSGNIHYNEKFKGRATITADKSTSTAYMELSSLTSEDTAVYYCARLRNWDEPMDYWGQGTTVTVSS

SEQ ID NO: 1122 - protein, 5 aa, Artificial Sequence
  hEp 18-G9 HCDR1
NYWLG

SEQ ID NO: 1123 - protein, 17 aa, Artificial Sequence
  hEp 18-G9 HCDR2
DIFPGSGNIHYNEKFKG

SEQ ID NO: 1124 - protein, 10 aa, Artificial Sequence
  hEp 18-G9 HCDR3
LRNWDEPMDY

SEQ ID NO: 1125 - DNA, 357 bp, Artificial Sequence
  hEp 18-G9 H
caggtgcagctggtccagtctggagctgaggtgaaaaagcctgggtcttcagtgaaggtatcctgcaaggcttctggatacaccttctctaactactggctaggttgggtaaggcagacgcctggacagggacttgagtggatgggagatattttccctggaagtggtaatatccactacaatgagaagttcaagggcagagccacaatcactgcagacaaatctacgagcacagcctatatggaactcagtagcctgacatctgaggacactgctgtctattactgtgcaagactgaggaactgggacgagcctatggactactggggccaagggaccacggtcaccgtctcctcc

SEQ ID NO: 1126 - protein, 501 aa, Artificial Sequence
  hEp 18-G9 LH x I2C HL
DIVMTQTPLSLTVTPGEPVSISCKSSQSLLNSGNQKNYLTWYLQKPGQSPQLLIYWASTRESGVPDRFSGSGSGTDFTLKISRVEAEDVGVYYCQNDYSYPLTFGQGTKLEIKGGGGSGGGGSGGGGSQVQLVQSGAEVKKPGSSVKVSCKASGYTFSNYWLGWVRQTPGQGLEWMGDIFPGSGNIHYNEKFKGRATITADKSTSTAYMELSSLTSEDTAVYYCARLRNWDEPMDYWGQGTTVTVSSGGGGSEVQLVESGGGLVQPGGSLKLSCAASGFTFNKYAMNWVRQAPGKGLEWVARIRSKYNNYATYYADSVKDRFTISRDDSKNTAYLQMNNLKTEDTAVYYCVRHGNFGNSYISYWAYWGQGTLVTVSSGGGGSGGGGSGGGGSQTVVTQEPSLTVSPGGTVTLTCGSSTGAVTSGNYPNWVQQKPGQAPRGLIGGTKFLAPGTPARFSGSLLGGKAALTLSGVQPEDEAEYYCVLWYSNRWVFGGGTKLTVL

SEQ ID NO: 1127 - DNA, 1503 bp, Artificial Sequence
  hEp 18-G9 LH x I2C HL
gacatcgtgatgacacagactccactctccctgactgtgacaccaggagagccggtctctatcagctgcaagtccagtcagagtctgttaaacagtggaaatcaaaagaactacttgacctggtacctgcagaaaccagggcagtctcctcaactgttgatctactgggcatccactagggaatctggggtccctgatcgcttctcaggcagtggatctggaacagatttcactctcaaaatcagccgtgtggaggctgaagacgtgggagtttattactgtcagaatgattatagttatccgctcacgttcggtcaagggaccaagcttgagatcaaaggtggtggtggttctggcggcggcggctccggtggtggtggttctcaggtgcagctggtccagtctggagctgaggtgaaaaagcctgggtcttcagtgaaggtatcctgcaaggcttctggatacaccttctctaactactggctaggttgggtaaggcagacgcctggacagggacttgagtggatgggagatattttccctggaagtggtaatatccactacaatgagaagttcaagggcagagccacaatcactgcagacaaatctacgagcacagcctatatggaactcagtagcctgacatctgaggacactgctgtctattactgtgcaagactgaggaactgggacgagcctatggactactggggccaagggaccacggtcaccgtctcctccggaggtggtggatccgaggtgcagctggtcgagtctggaggaggattggtgcagcctggagggtcattgaaactctcatgtgcagcctctggattcaccttcaataagtacgccatgaactgggtccgccaggctccaggaaagggtttggaatgggttgctcgcataagaagtaaatataataattatgcaacatattatgccgattcagtgaaagacaggttcaccatctccagagatgattcaaaaaacactgcctatctacaaatgaacaacttgaaaactgaggacactgccgtgtactactgtgtgagacatgggaacttcggtaatagctacatatcctactgggcttactggggccaagggactctggtcaccgtctcctcaggtggtggtggttctggcggcggcggctccggtggtggtggttctcagactgttgtgactcaggaaccttcactcaccgtatcacctggtggaacagtcacactcacttgtggctcctcgactggggctgttacatctggcaactacccaaactgggtccaacaaaaaccaggtcaggcaccccgtggtctaataggtgggactaagttcctcgcccccggtactcctgccagattctcaggctccctgcttggaggcaaggctgccctcaccctctcaggggtacagccagaggatgaggcagaatattactgtgttctatggtacagcaaccgctgggtgttcggtggaggaaccaaactgactgtccta

SEQ ID NO: 1128 - protein, 314 aa, Homo sapiens
MAPPQVLAFGLLLAAATATFAAAQEECVCENYKLAVNCFVNNNRQCQCTSVGAQNTVICSKLAAKCLVMKAEMNGSKLGRRAKPEGALQNNDGLYDPDCDESGLFKAKQCNGTSTCWCVNTAGVRRTDKDTEITCSERVRTYWIIIELKHKAREKPYDSKSLRTALQKEITTRYQLDPKFITSILYENNVITIDLVQNSSQKTQNDVDIADVAYYFEKDVKGESLFHSKKMDLTVNGEQLDLDPGQTLIYYVDEKAPEFSMQGLKAGVIAVIVVVVIAVVAGIVVLVISRKKRMAKYEKAEIKEMGEMHRELNA

SEQ ID NO: 1129 - DNA, 1528 bp, Homo sapiens
cggcgagcgagcaccttcgacgcggtccggggaccccctcgtcgctgtcctcccgacgcggacccgcgtgccccaggcctcgcgctgcccggccggctcctcgtgtcccactcccggcgcacgccctcccgcgagtcccgggcccctcccgcgcccctcttctcggcgcgcgcgcagcatggcgcccccgcaggtcctcgcgttcgggcttctgcttgccgcggcgacggcgacttttgccgcagctcaggaagaatgtgtctgtgaaaactacaagctggccgtaaactgctttgtgaataataatcgtcaatgccagtgtacttcagttggtgcacaaaatactgtcatttgctcaaagctggctgccaaatgtttggtgatgaaggcagaaatgaatggctcaaaacttgggagaagagcaaaacctgaaggggccctccagaacaatgatgggctttatgatcctgactgcgatgagagcgggctctttaaggccaagcagtgcaacggcacctccacgtgctggtgtgtgaacactgctggggtcagaagaacagacaaggacactgaaataacctgctctgagcgagtgagaacctactggatcatcattgaactaaaacacaaagcaagagaaaaaccttatgatagtaaaagtttgcggactgcacttcagaaggagatcacaacgcgttatcaactggatccaaaatttatcacgagtattttgtatgagaataatgttatcactattgatctggttcaaaattcttctcaaaaaactcagaatgatgtggacatagctgatgtggcttattattttgaaaaagatgttaaaggtgaatccttgtttcattctaagaaaatggacctgacagtaaatggggaacaactggatctggatcctggtcaaactttaatttattatgttgatgaaaaagcacctgaattctcaatgcagggtctaaaagctggtgttattgctgttattgtggttgtggtgatagcagttgttgctggaattgttgtgctggttatttccagaaagaagagaatggcaaagtatgagaaggctgagataaaggagatgggtgagatgcatagggaactcaatgcataactatataatttgaagattatagaagaagggaaatagcaaatggacacaaattacaaatgtgtgtgcgtgggacgaagacatctttgaaggtcatgagtttgttagtttaacatcatatatttgtaatagtgaaacctgtactcaaaatataagcagcttgaaactggctttaccaatcttgaaatttgaccacaagtgtcttatatatgcagatctaatgtaaaatccagaacttggactccatcgttaaaattatttatgtgtaacattcaaatgtgtgcattaaatatgcttccacagtaaaatctgaaaaactgatttgtgattgaaagctgcctttctatttacttgagtcttgtacatacatacttttttatgagctatgaaataaaacattttaaactg

SEQ ID NO: 1130 - protein, 36 aa, Homo sapiens
ECVCENYKLAVNCFVNNNRQCQCTSVGAQNTVICSK

SEQ ID NO: 1131 - protein, 113 aa, Artificial Sequence
  FAP L
DIVMTQSPDSLAVSLGERATINCKSSQSLLYSRNQKNYLAWYQQKPGQPPKLLIFWASTRESGVPDRFSGSGFGTDFTLTISSLQAEDVAVYYCQQYFSYPLTFGQGTKVEIK

SEQ ID NO: 1132 - protein, 17 aa, Artificial Sequence
  FAP L-CDR1
KSSQSLLYSRNQKNYLA

SEQ ID NO: 1133 - protein, 7 aa, Artificial Sequence
  FAP L-CDR2
WASTRES

SEQ ID NO: 1134 - protein, 9 aa, Artificial Sequence
  FAP L-CDR3
QQYFSYPLT

SEQ ID NO: 1135 - DNA, 339 bp, Artificial Sequence
  FAP L
gacattgtgatgacccagtctccagactctttggctgtgtctctaggggagagggccaccatcaactgcaagtccagtcagagccttttatattctagaaatcaaaagaactacttggcctggtatcagcagaaaccaggacagccacccaaactcctcatcttttgggctagcactagggaatctggggtacctgataggttcagtggcagtgggtttgggacagacttcaccctcaccattagcagcctgcaggctgaagatgtggcagtttattactgtcagcaatattttagctatccgctcacgttcggacaagggaccaaggtggaaataaaa

SEQ ID NO: 1136 - protein, 124 aa, Artificial Sequence
  FAP H
QVQLVQSGAEVKKPGASVKVSCKTSRYTFTEYTIHWVRQAPGQRLEWIGGINPNNGIPNYNQKFKGRVTITVDTSASTAYMELSSLRSEDTAVYYCARRRIAYGYDEGHAMDYWGQGTLVTVSS

SEQ ID NO: 1137 - protein, 5 aa, Artificial Sequence
  FAP H-CDR1
EYTIH

SEQ ID NO: 1138 - protein, 17 aa, Artificial Sequence
  FAP H-CDR2
GINPNNGIPNYNQKFKG

SEQ ID NO: 1139 - protein, 15 aa, Artificial Sequence
  FAP H-CDR3
RRIAYGYDEGHAMDY

SEQ ID NO: 1140 - DNA, 372 bp, Artificial Sequence
  FAP H
caggtgcaactagtgcagtccggcgccgaagtgaagaaacccggtgcttccgtgaaagtcagctgtaaaactagtagatacaccttcactgaatacaccatacactgggttagacaggcccctggccaaaggctggagtggataggaggtattaatcctaacaatggtattcctaactacaaccagaagttcaagggccgggtcaccatcaccgtagacacctctgccagcaccgcctacatggaactgtccagcctgcgctccgaggacactgcagtctactactgcgccagaagaagaatcgcctatggttacgacgagggccatgctatggactactggggtcaaggaacccttgtcaccgtctcctcc

SEQ ID NO: 1141 - protein, 252 aa, Artificial Sequence
  FAP LH
DIVMTQSPDSLAVSLGERATINCKSSQSLLYSRNQKNYLAWYQQKPGQPPKLLIFWASTRESGVPDRFSGSGFGTDFTLTISSLQAEDVAVYYCQQYFSYPLTFGQGTKVEIKGGGGSGGGGSGGGGSQVQLVQSGAEVKKPGASVKVSCKTSRYTFTEYTIHWVRQAPGQRLEWIGGINPNNGIPNYNQKFKGRVTITVDTSASTAYMELSSLRSEDTAVYYCARRRIAYGYDEGHAMDYWGQGTLVTVSS

SEQ ID NO: 1142 - DNA, 756 bp, Artificial Sequence
  FAP LH
gacattgtgatgacccagtctccagactctttggctgtgtctctaggggagagggccaccatcaactgcaagtccagtcagagccttttatattctagaaatcaaaagaactacttggcctggtatcagcagaaaccaggacagccacccaaactcctcatcttttgggctagcactagggaatctggggtacctgataggttcagtggcagtgggtttgggacagacttcaccctcaccattagcagcctgcaggctgaagatgtggcagtttattactgtcagcaatattttagctatccgctcacgttcggacaagggaccaaggtggaaataaaaggtggtggtggttctggcggcggcggctccggtggtggtggttctcaggtgcaactagtgcagtccggcgccgaagtgaagaaacccggtgcttccgtgaaagtcagctgtaaaactagtagatacaccttcactgaatacaccatacactgggttagacaggcccctggccaaaggctggagtggataggaggtattaatcctaacaatggtattcctaactacaaccagaagttcaagggccgggtcaccatcaccgtagacacctctgccagcaccgcctacatggaactgtccagcctgcgctccgaggacactgcagtctactactgcgccagaagaagaatcgcctatggttacgacgagggccatgctatggactactggggtcaaggaacccttgtcaccgtctcctcc

SEQ ID NO: 1143 - protein, 506 aa, Artificial Sequence
  FAP LH x I2C HL
DIVMTQSPDSLAVSLGERATINCKSSQSLLYSRNQKNYLAWYQQKPGQPPKLLIFWASTRESGVPDRFSGSGFGTDFTLTISSLQAEDVAVYYCQQYFSYPLTFGQGTKVEIKGGGGSGGGGSGGGGSQVQLVQSGAEVKKPGASVKVSCKTSRYTFTEYTIHWVRQAPGQRLEWIGGINPNNGIPNYNQKFKGRVTITVDTSASTAYMELSSLRSEDTAVYYCARRRIAYGYDEGHAMDYWGQGTLVTVSSGGGGSEVQLVESGGGLVQPGGSLKLSCAASGFTFNKYAMNWVRQAPGKGLEWVARIRSKYNNYATYYADSVKDRFTISRDDSKNTAYLQMNNLKTEDTAVYYCVRHGNFGNSYISYWAYWGQGTLVTVSSGGGGSGGGGSGGGGSQTVVTQEPSLTVSPGGTVTLTCGSSTGAVTSGNYPNWVQQKPGQAPRGLIGGTKFLAPGTPARFSGSLLGGKAALTLSGVQPEDEAEYYCVLWYSNRWVFGGGTKLTVL

SEQ ID NO: 1144 - DNA, 1518 bp, Artificial Sequence
  FAP LH x I2C HL
gacattgtgatgacccagtctccagactctttggctgtgtctctaggggagagggccaccatcaactgcaagtccagtcagagccttttatattctagaaatcaaaagaactacttggcctggtatcagcagaaaccaggacagccacccaaactcctcatcttttgggctagcactagggaatctggggtacctgataggttcagtggcagtgggtttgggacagacttcaccctcaccattagcagcctgcaggctgaagatgtggcagtttattactgtcagcaatattttagctatccgctcacgttcggacaagggaccaaggtggaaataaaaggtggtggtggttctggcggcggcggctccggtggtggtggttctcaggtgcaactagtgcagtccggcgccgaagtgaagaaacccggtgcttccgtgaaagtcagctgtaaaactagtagatacaccttcactgaatacaccatacactgggttagacaggcccctggccaaaggctggagtggataggaggtattaatcctaacaatggtattcctaactacaaccagaagttcaagggccgggtcaccatcaccgtagacacctctgccagcaccgcctacatggaactgtccagcctgcgctccgaggacactgcagtctactactgcgccagaagaagaatcgcctatggttacgacgagggccatgctatggactactggggtcaaggaacccttgtcaccgtctcctccggaggtggtggatccgaggtgcagctggtcgagtctggaggaggattggtgcagcctggagggtcattgaaactctcatgtgcagcctctggattcaccttcaataagtacgccatgaactgggtccgccaggctccaggaaagggtttggaatgggttgctcgcataagaagtaaatataataattatgcaacatattatgccgattcagtgaaagacaggttcaccatctccagagatgattcaaaaaacactgcctatctacaaatgaacaacttgaaaactgaggacactgccgtgtactactgtgtgagacatgggaacttcggtaatagctacatatcctactgggcttactggggccaagggactctggtcaccgtctcctcaggtggtggtggttctggcggcggcggctccggtggtggtggttctcagactgttgtgactcaggaaccttcactcaccgtatcacctggtggaacagtcacactcacttgtggctcctcgactggggctgttacatctggcaactacccaaactgggtccaacaaaaaccaggtcaggcaccccgtggtctaataggtgggactaagttcctcgcccccggtactcctgccagattctcaggctccctgcttggaggcaaggctgccctcaccctctcaggggtacagccagaggatgaggcagaatattactgtgttctatggtacagcaaccgctgggtgttcggtggaggaaccaaactgactgtccta

SEQ ID NO: 1145 - protein, 506 aa, Artificial Sequence
  FAP  LH x H2C HL
DIVMTQSPDSLAVSLGERATINCKSSQSLLYSRNQKNYLAWYQQKPGQPPKLLIFWASTRESGVPDRFSGSGFGTDFTLTISSLQAEDVAVYYCQQYFSYPLTFGQGTKVEIKGGGGSGGGGSGGGGSQVQLVQSGAEVKKPGASVKVSCKTSRYTFTEYTIHWVRQAPGQRLEWIGGINPNNGIPNYNQKFKGRVTITVDTSASTAYMELSSLRSEDTAVYYCARRRIAYGYDEGHAMDYWGQGTLVTVSSGGGGSEVQLVESGGGLVQPGGSLKLSCAASGFTFNKYAMNWVRQAPGKGLEWVARIRSKYNNYATYYADSVKDRFTISRDDSKNTAYLQMNNLKTEDTAVYYCVRHGNFGNSYISYWAYWGQGTLVTVSSGGGGSGGGGSGGGGSQTVVTQEPSLTVSPGGTVTLTCGSSTGAVTSGYYPNWVQQKPGQAPRGLIGGTKFLAPGTPARFSGSLLGGKAALTLSGVQPEDEAEYYCALWYSNRWVFGGGTKLTVL

SEQ ID NO: 1146 - DNA, 1518 bp, Artificial Sequence
  FAP  LH x H2C HL
gacattgtgatgacccagtctccagactctttggctgtgtctctaggggagagggccaccatcaactgcaagtccagtcagagccttttatattctagaaatcaaaagaactacttggcctggtatcagcagaaaccaggacagccacccaaactcctcatcttttgggctagcactagggaatctggggtacctgataggttcagtggcagtgggtttgggacagacttcaccctcaccattagcagcctgcaggctgaagatgtggcagtttattactgtcagcaatattttagctatccgctcacgttcggacaagggaccaaggtggaaataaaaggtggtggtggttctggcggcggcggctccggtggtggtggttctcaggtgcaactagtgcagtccggcgccgaagtgaagaaacccggtgcttccgtgaaagtcagctgtaaaactagtagatacaccttcactgaatacaccatacactgggttagacaggcccctggccaaaggctggagtggataggaggtattaatcctaacaatggtattcctaactacaaccagaagttcaagggccgggtcaccatcaccgtagacacctctgccagcaccgcctacatggaactgtccagcctgcgctccgaggacactgcagtctactactgcgccagaagaagaatcgcctatggttacgacgagggccatgctatggactactggggtcaaggaacccttgtcaccgtctcctccggaggtggtggatccgaggtgcagctggtcgagtctggaggaggattggtgcagcctggagggtcattgaaactctcatgtgcagcctctggattcaccttcaataagtacgccatgaactgggtccgccaggctccaggaaagggtttggaatgggttgctcgcataagaagtaaatataataattatgcaacatattatgccgattcagtgaaagacaggttcaccatctccagagatgattcaaaaaacactgcctatctacaaatgaacaacttgaaaactgaggacactgccgtgtactactgtgtgagacatgggaacttcggtaatagctacatatcctactgggcttactggggccaagggactctggtcaccgtctcctcaggtggtggtggttctggcggcggcggctccggtggtggtggttctcagactgttgtgactcaggaaccttcactcaccgtatcacctggtggaacagtcacactcacttgtggctcctcgactggggctgttacatctggctactacccaaactgggtccaacaaaaaccaggtcaggcaccccgtggtctaataggtgggactaagttcctcgcccccggtactcctgccagattctcaggctccctgcttggaggcaaggctgccctcaccctctcaggggtacagccagaggatgaggcagaatattactgtgctctatggtacagcaaccgctgggtgttcggtggaggaaccaaactgactgtccta

SEQ ID NO: 1147 - protein, 506 aa, Artificial Sequence
  FAP  LH x F12Q HL
DIVMTQSPDSLAVSLGERATINCKSSQSLLYSRNQKNYLAWYQQKPGQPPKLLIFWASTRESGVPDRFSGSGFGTDFTLTISSLQAEDVAVYYCQQYFSYPLTFGQGTKVEIKGGGGSGGGGSGGGGSQVQLVQSGAEVKKPGASVKVSCKTSRYTFTEYTIHWVRQAPGQRLEWIGGINPNNGIPNYNQKFKGRVTITVDTSASTAYMELSSLRSEDTAVYYCARRRIAYGYDEGHAMDYWGQGTLVTVSSGGGGSEVQLVESGGGLVQPGGSLKLSCAASGFTFNSYAMNWVRQAPGKGLEWVARIRSKYNNYATYYADSVKGRFTISRDDSKNTAYLQMNNLKTEDTAVYYCVRHGNFGNSYVSWWAYWGQGTLVTVSSGGGGSGGGGSGGGGSQTVVTQEPSLTVSPGGTVTLTCGSSTGAVTSGNYPNWVQQKPGQAPRGLIGGTKFLAPGTPARFSGSLLGGKAALTLSGVQPEDEAEYYCVLWYSNRWVFGGGTKLTVL

SEQ ID NO: 1148 - DNA, 1518 bp, Artificial Sequence
  FAP  LH x F12Q HL
gacattgtgatgacccagtctccagactctttggctgtgtctctaggggagagggccaccatcaactgcaagtccagtcagagccttttatattctagaaatcaaaagaactacttggcctggtatcagcagaaaccaggacagccacccaaactcctcatcttttgggctagcactagggaatctggggtacctgataggttcagtggcagtgggtttgggacagacttcaccctcaccattagcagcctgcaggctgaagatgtggcagtttattactgtcagcaatattttagctatccgctcacgttcggacaagggaccaaggtggaaataaaaggtggtggtggttctggcggcggcggctccggtggtggtggttctcaggtgcaactagtgcagtccggcgccgaagtgaagaaacccggtgcttccgtgaaagtcagctgtaaaactagtagatacaccttcactgaatacaccatacactgggttagacaggcccctggccaaaggctggagtggataggaggtattaatcctaacaatggtattcctaactacaaccagaagttcaagggccgggtcaccatcaccgtagacacctctgccagcaccgcctacatggaactgtccagcctgcgctccgaggacactgcagtctactactgcgccagaagaagaatcgcctatggttacgacgagggccatgctatggactactggggtcaaggaacccttgtcaccgtctcctccggaggtggtggatccgaggtgcagctggtcgagtctggaggaggattggtgcagcctggagggtcattgaaactctcatgtgcagcctctggattcaccttcaatagctacgccatgaactgggtccgccaggctccaggaaagggtttggaatgggttgctcgcataagaagtaaatataataattatgcaacatattatgccgattcagtgaaaggcaggttcaccatctccagagatgattcaaaaaacactgcctatctacaaatgaacaacttgaaaactgaggacactgccgtgtactactgtgtgagacatgggaacttcggtaatagctacgtttcctggtgggcttactggggccaagggactctggtcaccgtctcctcaggtggtggtggttctggcggcggcggctccggtggtggtggttctcagactgttgtgactcaggaaccttcactcaccgtatcacctggtggaacagtcacactcacttgtggctcctcgactggggctgttacatctggcaactacccaaactgggtccaacaaaaaccaggtcaggcaccccgtggtctaataggtgggactaagttcctcgcccccggtactcctgccagattctcaggctccctgcttggaggcaaggctgccctcaccctctcaggggtacagccagaggatgaggcagaatattactgtgttctatggtacagcaaccgctgggtgttcggtggaggaaccaaactgactgtccta

SEQ ID NO: 1149 - DNA, 2283 bp, Artificial Sequence
  FAP alpha
atgaagacttgggtaaaaatcgtatttggagttgccacctctgctgtgcttgccttattggtgatgtgcattgtcttacgcccttcaagagttcataactctgaagaaaatacaatgagagcactcacactgaaggatattttaaatggaacattttcttataaaacattttttccaaactggatttcaggacaagaatatcttcatcaatctgcagataacaatatagtactttataatattgaaacaggacaatcatataccattttgagtaatagaaccatgaaaagtgtgaatgcttcaaattacggcttatcacctgatcggcaatttgtatatctagaaagtgattattcaaagctttggagatactcttacacagcaacatattacatctatgaccttagcaatggagaatttgtaagaggaaatgagcttcctcgtccaattcagtatttatgctggtcgcctgttgggagtaaattagcatatgtctatcaaaacaatatctatttgaaacaaagaccaggagatccaccttttcaaataacatttaatggaagagaaaataaaatatttaatggaatcccagactgggtttatgaagaggaaatgcttgctacaaaatatgctctctggtggtctcctaatggaaaatttttggcatatgcggaatttaatgatacggatataccagttattgcctattcctattatggcgatgaacaatatcctagaacaataaatattccatacccaaaggctggagctaagaatcccgttgttcggatatttattatcgataccacttaccctgcgtatgtaggtccccaggaagtgcctgttccagcaatgatagcctcaagtgattattatttcagttggctcacgtgggttactgatgaacgagtatgtttgcagtggctaaaaagagtccagaatgtttcggtcctgtctatatgtgacttcagggaagactggcagacatgggattgtccaaagacccaggagcatatagaagaaagcagaactggatgggctggtggattctttgtttcaacaccagttttcagctatgatgccatttcgtactacaaaatatttagtgacaaggatggctacaaacatattcactatatcaaagacactgtggaaaatgctattcaaattacaagtggcaagtgggaggccataaatatattcagagtaacacaggattcactgttttattctagcaatgaatttgaagaataccctggaagaagaaacatctacagaattagcattggaagctatcctccaagcaagaagtgtgttacttgccatctaaggaaagaaaggtgccaatattacacagcaagtttcagcgactacgccaagtactatgcacttgtctgctacggcccaggcatccccatttccacccttcatgatggacgcactgatcaagaaattaaaatcctggaagaaaacaaggaattggaaaatgctttgaaaaatatccagctgcctaaagaggaaattaagaaacttgaagtagatgaaattactttatggtacaagatgattcttcctcctcaatttgacagatcaaagaagtatcccttgctaattcaagtgtatggtggtccctgcagtcagagtgtaaggtctgtatttgctgttaattggatatcttatcttgcaagtaaggaagggatggtcattgccttggtggatggtcgaggaacagctttccaaggtgacaaactcctctatgcagtgtatcgaaagctgggtgtttatgaagttgaagaccagattacagctgtcagaaaattcatagaaatgggtttcattgatgaaaaaagaatagccatatggggctggtcctatggaggatacgtttcatcactggcccttgcatctggaactggtcttttcaaatgtggtatagcagtggctccagtctccagctgggaatattacgcgtctgtctacacagagagattcatgggtctcccaacaaaggatgataatcttgagcactataagaattcaactgtgatggcaagagcagaatatttcagaaatgtagactatcttctcatccacggaacagcagatgataatgtgcactttcaaaactcagcacagattgctaaagctctggttaatgcacaagtggatttccaggcaatgtggtactctgaccagaaccacggcttatccggcctgtccacgaaccacttatacacccacatgacccacttcctaaagcagtgtttctctttgtcagactaa

SEQ ID NO: 1150 - protein, 760 aa, Artificial Sequence
  FAP alpha
MKTWVKIVFGVATSAVLALLVMCIVLRPSRVHNSEENTMRALTLKDILNGTFSYKTFFPNWISGQEYLHQSADNNIVLYNIETGQSYTILSNRTMKSVNASNYGLSPDRQFVYLESDYSKLWRYSYTATYYIYDLSNGEFVRGNELPRPIQYLCWSPVGSKLAYVYQNNIYLKQRPGDPPFQITFNGRENKIFNGIPDWVYEEEMLATKYALWWSPNGKFLAYAEFNDTDIPVIAYSYYGDEQYPRTINIPYPKAGAKNPVVRIFIIDTTYPAYVGPQEVPVPAMIASSDYYFSWLTWVTDERVCLQWLKRVQNVSVLSICDFREDWQTWDCPKTQEHIEESRTGWAGGFFVSTPVFSYDAISYYKIFSDKDGYKHIHYIKDTVENAIQITSGKWEAINIFRVTQDSLFYSSNEFEEYPGRRNIYRISIGSYPPSKKCVTCHLRKERCQYYTASFSDYAKYYALVCYGPGIPISTLHDGRTDQEIKILEENKELENALKNIQLPKEEIKKLEVDEITLWYKMILPPQFDRSKKYPLLIQVYGGPCSQSVRSVFAVNWISYLASKEGMVIALVDGRGTAFQGDKLLYAVYRKLGVYEVEDQITAVRKFIEMGFIDEKRIAIWGWSYGGYVSSLALASGTGLFKCGIAVAPVSSWEYYASVYTERFMGLPTKDDNLEHYKNSTVMARAEYFRNVDYLLIHGTADDNVHFQNSAQIAKALVNAQVDFQAMWYSDQNHGLSGLSTNHLYTHMTHFLKQCFSLSD

SEQ ID NO: 1151 - DNA, 2283 bp, Macaca fascicularis
atgaagacttgggtaaaaatcgtatttggagttgccacctctgctgtgcttgccttattggtgatgtgcattgtcttacgccctccaagagttcataactctgaagaaaatacaatgagagcactcacactgaaggatattttaaatgggacattttcttataaaacattttttccaaactggatttcaggacaagaatatcttcatcaatctgcagataacaatatagtactttataatattgaaacaggacaatcatataccattttgagtaacagaaccatgaaaagtgtgaatgcttcaaattatggcttatcacctgatcggcaatttgtatatctagaaagtgattattcaaagctttggagatactcttacacagcaacatattacatctatgaccttagcaatggagaatttgtaagaggaaatgagcttcctcgtccaattcagtatttatgctggtcgcctgttgggagtaaattagcatatgtctatcaaaacaatatctatttgaaacaaagaccaggagatccaccttttcaaataacatttaatggaagagaaaataaaatatttaatggaatcccagactgggtttatgaagaggaaatgcttgctacaaaatatgctctctggtggtctcctaatggaaaatttttggcatatgcggaatttaatgatacagatataccagttattgcctattcctattatggcgatgaacaatatcccagaacaataaatattccatacccaaaggcyggagctaagaatccttttgttcggatatttattatcgataccacttaccctgcgtatgtaggtccccaggaagtgcctgttccagcaatgatagcctcaagtgattattatttcagttggctcacgtgggttactgatgaacgagtatgtttgcagtggctaaaaagagtccagaatgtttcggtcttgtctatatgtgatttcagggaagactggcagacatgggattgtccaaagacccaggagcatatagaagaaagcagaactggatgggctggtggattctttgtttcaacaccagttttcagctatgatgccatttcatactacaaaatatttagtgacaaggatggctacaaacatattcactatatcaaagacactgtggaaaatgctattcaaattacaagtggcaagtgggaggccataaatatattcagagtaacacaggattcactgttttattctagcaatgaatttgaagattaccctggaagaagaaacatctacagaattagcattggaagctatcctccaagcaagaagtgtgttacttgccatctaaggaaagaaaggtgccaatattacacagcaagtttcagcgactacgccaagtactatgcacttgtctgctatggcccaggcatccccatttccacccttcatgacggacgcactgatcaagaaattaaaatcctggaagaaaacaaggaattggaaaatgctttgaaaaatatccagctgcctaaagaggaaattaagaaacttgaagtagatgaaattactttatggtacaagatgattcttcctcctcaatttgacagatcaaagaagtatcccttgctaattcaagtgtatggtggtccctgcagtcagagtgtraggtctgtatttgctgttaattggatatcktatcttgcaagtaaggaagggatggtcattgccttggtggatggtcgaggaacagctttccaaggtgacaaactcctgtatgcagtgtatcgaaagctgggtgtttatgaagttgaagaccagattacagctgtcagaaaattcatagaaatgggtttcattgatgaaaaaagaatagccatatggggctggtcctatggaggataygtttcatcactggcccttgcatctggaactggtcttttcaaatgtgggatagcagtggctccagtctccagctgggaatattacgcgtctgtctacacagaaagattcatgggtcttcccacaaaggatgataatcttgagcactacaaaaattcaactgtgatggcaagagcagaatatttcagaaatgtagactatcttctcatccacggaacagcagatgataatgtgcactttcaaaactcagcacagattgctaaagctctggttaatgcacaagtggatttccaggcaatgtggtactctgaccagaaccacggcttatccggcctgtccacgaaccacttatacacccacatgacccactttctaaagcagtgtttttctttgtcggactaa

SEQ ID NO: 1152 - protein, 760 aa, Macaca fascicularis
MKTWVKIVFGVATSAVLALLVMCIVLRPPRVHNSEENTMRALTLKDILNGTFSYKTFFPNWISGQEYLHQSADNNIVLYNIETGQSYTILSNRTMKSVNASNYGLSPDRQFVYLESDYSKLWRYSYTATYYIYDLSNGEFVRGNELPRPIQYLCWSPVGSKLAYVYQNNIYLKQRPGDPPFQITFNGRENKIFNGIPDWVYEEEMLATKYALWWSPNGKFLAYAEFNDTDIPVIAYSYYGDEQYPRTINIPYPKAGAKNPFVRIFIIDTTYPAYVGPQEVPVPAMIASSDYYFSWLTWVTDERVCLQWLKRVQNVSVLSICDFREDWQTWDCPKTQEHIEESRTGWAGGFFVSTPVFSYDAISYYKIFSDKDGYKHIHYIKDTVENAIQITSGKWEAINIFRVTQDSLFYSSNEFEDYPGRRNIYRISIGSYPPSKKCVTCHLRKERCQYYTASFSDYAKYYALVCYGPGIPISTLHDGRTDQEIKILEENKELENALKNIQLPKEEIKKLEVDEITLWYKMILPPQFDRSKKYPLLIQVYGGPCSQSVRSVFAVNWISYLASKEGMVIALVDGRGTAFQGDKLLYAVYRKLGVYEVEDQITAVRKFIEMGFIDEKRIAIWGWSYGGYVSSLALASGTGLFKCGIAVAPVSSWEYYASVYTERFMGLPTKDDNLEHYKNSTVMARAEYFRNVDYLLIHGTADDNVHFQNSAQIAKALVNAQVDFQAMWYSDQNHGLSGLSTNHLYTHMTHFLKQCFSLSD

SEQ ID NO: 1153 - DNA, 24 bp, Artificial Sequence
  forward primer
cagcttccaactacaaagacagac

SEQ ID NO: 1154 - DNA, 25 bp, Artificial Sequence
  reverse primer
tttcctcttcataaacccagtctgg

SEQ ID NO: 1155 - DNA, 26 bp, Artificial Sequence
  forward primer
ttgaaacaaagaccaggagatccacc

SEQ ID NO: 1156 - DNA, 25 bp, Artificial Sequence
  reverse primer
agatggcaagtaacacacttcttgc

SEQ ID NO: 1157 - DNA, 28 bp, Artificial Sequence
  forward primer
gaagaaacatctacagaattagcattgg

SEQ ID NO: 1158 - DNA, 28 bp, Artificial Sequence
  reverse primer
cacatttgaaaagaccagttccagatgc

SEQ ID NO: 1159 - DNA, 33 bp, Artificial Sequence
  forward primer
agattacagctgtcagaaaattcatagaaatgg

SEQ ID NO: 1160 - DNA, 29 bp, Artificial Sequence
  reverse primer
atataaggttttcagattctgatacaggc

SEQ ID NO: 1161 - DNA, 51 bp, Artificial Sequence
  5'FAP-VH-A-XhoI
ccgctactcgagtctggasctgagstgrwgaagcctggggcttcagtaaag

SEQ ID NO: 1162 - DNA, 75 bp, Artificial Sequence
  3'FAP-VH-B
ctgtctcacccagtgtatggtgtattcagtgaatgtgtatcyagaagycttgcaggacayctttactgaagcccc

SEQ ID NO: 1163 - DNA, 75 bp, Artificial Sequence
  5'FAP-VH-C
cactgggtgagacagkcccmtggamagagmcttgagtggatkggaggtattaatcctaacaatggtattcctaac

SEQ ID NO: 1164 - DNA, 78 bp, Artificial Sequence
  3'FAP-VH-D
catgtaggcggtgctggmggacktgyctmyagttawtgtgrccctgcccttgaacttctgattgtagttaggaatacc

SEQ ID NO: 1165 - DNA, 78 bp, Artificial Sequence
  5'FAP-VH-E
agcaccgcctacatggagctcmgcagcctgasatctgaggatactgcggtctattwctgtgcaagaagaagaatcgcc

SEQ ID NO: 1166 - DNA, 84 bp, Artificial Sequence
  3'FAP-VH-F-BstEII
ccagtaggtgaccagggttccttgaccccagtagtccatagcatggccctcgtcgtaaccataggcgattcttcttcttgcaca

SEQ ID NO: 1167 - DNA, 87 bp, Artificial Sequence
  5'FAP-VL-A-SacI
cgacctgagctcgtgatgacacagactccayyctccctasctgtgacasytggagagmmggyttctatsagctgcaagtccagtcag

SEQ ID NO: 1168 - DNA, 84 bp, Artificial Sequence
  3'FAP-VL-B
agactgccctggcttctgcwggwaccaggccaagtagttcttttgattacgactatataaaaggctctgactggacttgcagct

SEQ ID NO: 1169 - DNA, 87 bp, Artificial Sequence
  5'FAP-VL-C
cagaagccagggcagtctcctmaactgctgatttwctgggcatccactagggaatctggggtccctgatcgcttctcaggcagtgga

SEQ ID NO: 1170 - DNA, 90 bp, Artificial Sequence
  3'FAP-VL-D
atattgctgacagtmataaactsccasgtcctcagcctscacwctgctgatcktgagaktgaaatccgtcccaratccactgcctgagaa

SEQ ID NO: 1171 - DNA, 80 bp, Artificial Sequence
  3'FAP-VL-E-BsiWI/SpeI
ccagtaactagtcgtacgtttgatctccaccttggtcccaccaccgaacgtgagcggatagctaaaatattgctgacagt

SEQ ID NO: 1172 - protein, 117 aa, Artificial Sequence
  PC32B8-H
EVQLVQSGAEVKKPGATVKISCKVSGYTFTNYWLNWVKQAPGRGLEWIGRIDPSDSEIHYDQKFKDRVTITADKSTNTAYIELSSLRSEDTAVYYCALTGIYAMAYWGQGTTVTVSS

SEQ ID NO: 1173 - protein, 5 aa, Artificial Sequence
  PC32B8-HCDR1
NYWLN

SEQ ID NO: 1174 - protein, 17 aa, Artificial Sequence
  PC32B8-HCDR2
RIDPSDSEIHYDQKFKD

SEQ ID NO: 1175 - protein, 8 aa, Artificial Sequence
  PC32B8-HCDR3
TGIYAMAY

SEQ ID NO: 1176 - DNA, 351 bp, Artificial Sequence
  PC32B8-H
gaggtgcagctggtccagtcaggcgccgaagtgaagaagcctggcgccacagtgaagatatcctgcaaggtcagcggctacaccttcaccaactactggctgaactgggtgaaacaggcgcccggcaggggcctggaatggataggcaggatcgaccccagcgacagcgagatccactacgaccagaagttcaaggacagagtcaccataaccgcggacaagagcaccaacaccgcctacatcgagctgtccagcctgagaagcgaggacaccgccgtgtactattgcgccctgaccggcatctacgccatggcctactggggccagggcaccacggtcaccgtctcctca

SEQ ID NO: 1177 - protein, 112 aa, Artificial Sequence
  PC32B8-L
DIVMTQSPPSLPVTPGEPASISCRSSKSLLHSNGNTYLYWYLQKPGQSPQLLIYRMSNLASGVPDRFSGSGSGTDFTLKISRVEAEDVGVYYCLQHLEYPYTFGQGTKLEIK

SEQ ID NO: 1178 - protein, 16 aa, Artificial Sequence
  PC32B8-LCDR1
RSSKSLLHSNGNTYLY

SEQ ID NO: 1179 - protein, 7 aa, Artificial Sequence
  PC32B8-LCDR2
RMSNLAS

SEQ ID NO: 1180 - protein, 9 aa, Artificial Sequence
  PC32B8-LCDR3
LQHLEYPYT

SEQ ID NO: 1181 - DNA, 336 bp, Artificial Sequence
  PC32B8-L
gacatcgtgatgacccagtcacctccaagcctgccagtgaccccaggcgagccagcgtccatcagctgcaggtccagcaagagcctgctgcacagcaacggcaacacctacctgtactggtatctgcagaagccaggccagagcccccagctgctgatctacaggatgagcaacctggctagcggcgtgccagacagattcagcggcagcggctctggaaccgacttcaccctgaagatcagcagggtggaggccgaggacgtgggcgtgtactactgcctgcagcacctggaatacccctacaccttcggccaagggaccaagctggaaatcaag

SEQ ID NO: 1182 - protein, 244 aa, Artificial Sequence
  PC32B8-HL
EVQLVQSGAEVKKPGATVKISCKVSGYTFTNYWLNWVKQAPGRGLEWIGRIDPSDSEIHYDQKFKDRVTITADKSTNTAYIELSSLRSEDTAVYYCALTGIYAMAYWGQGTTVTVSSGGGGSGGGGSGGGGSDIVMTQSPPSLPVTPGEPASISCRSSKSLLHSNGNTYLYWYLQKPGQSPQLLIYRMSNLASGVPDRFSGSGSGTDFTLKISRVEAEDVGVYYCLQHLEYPYTFGQGTKLEIK

SEQ ID NO: 1183 - DNA, 732 bp, Artificial Sequence
  PC32B8-HL
gaggtgcagctggtccagtcaggcgccgaagtgaagaagcctggcgccacagtgaagatatcctgcaaggtcagcggctacaccttcaccaactactggctgaactgggtgaaacaggcgcccggcaggggcctggaatggataggcaggatcgaccccagcgacagcgagatccactacgaccagaagttcaaggacagagtcaccataaccgcggacaagagcaccaacaccgcctacatcgagctgtccagcctgagaagcgaggacaccgccgtgtactattgcgccctgaccggcatctacgccatggcctactggggccagggcaccacggtcaccgtctcctcaggtggtggtggttctggcggcggcggctccggtggtggtggttctgacatcgtgatgacccagtcacctccaagcctgccagtgaccccaggcgagccagcgtccatcagctgcaggtccagcaagagcctgctgcacagcaacggcaacacctacctgtactggtatctgcagaagccaggccagagcccccagctgctgatctacaggatgagcaacctggctagcggcgtgccagacagattcagcggcagcggctctggaaccgacttcaccctgaagatcagcagggtggaggccgaggacgtgggcgtgtactactgcctgcagcacctggaatacccctacaccttcggccaagggaccaagctggaaatcaag

SEQ ID NO: 1184 - protein, 499 aa, Artificial Sequence
  PC32B8 HL x I2C HL
EVQLVQSGAEVKKPGATVKISCKVSGYTFTNYWLNWVKQAPGRGLEWIGRIDPSDSEIHYDQKFKDRVTITADKSTNTAYIELSSLRSEDTAVYYCALTGIYAMAYWGQGTTVTVSSGGGGSGGGGSGGGGSDIVMTQSPPSLPVTPGEPASISCRSSKSLLHSNGNTYLYWYLQKPGQSPQLLIYRMSNLASGVPDRFSGSGSGTDFTLKISRVEAEDVGVYYCLQHLEYPYTFGQGTKLEIKSGGGGSEVQLVESGGGLVQPGGSLKLSCAASGFTFNKYAMNWVRQAPGKGLEWVARIRSKYNNYATYYADSVKDRFTISRDDSKNTAYLQMNNLKTEDTAVYYCVRHGNFGNSYISYWAYWGQGTLVTVSSGGGGSGGGGSGGGGSQTVVTQEPSLTVSPGGTVTLTCGSSTGAVTSGNYPNWVQQKPGQAPRGLIGGTKFLAPGTPARFSGSLLGGKAALTLSGVQPEDEAEYYCVLWYSNRWVFGGGTKLTVL

SEQ ID NO: 1185 - DNA, 1497 bp, Artificial Sequence
  PC32B8 HL x I2C HL
gaggtgcagctggtccagtcaggcgccgaagtgaagaagcctggcgccacagtgaagatatcctgcaaggtcagcggctacaccttcaccaactactggctgaactgggtgaaacaggcgcccggcaggggcctggaatggataggcaggatcgaccccagcgacagcgagatccactacgaccagaagttcaaggacagagtcaccataaccgcggacaagagcaccaacaccgcctacatcgagctgtccagcctgagaagcgaggacaccgccgtgtactattgcgccctgaccggcatctacgccatggcctactggggccagggcaccacggtcaccgtctcctcaggtggtggtggttctggcggcggcggctccggtggtggtggttctgacatcgtgatgacccagtcacctccaagcctgccagtgaccccaggcgagccagcgtccatcagctgcaggtccagcaagagcctgctgcacagcaacggcaacacctacctgtactggtatctgcagaagccaggccagagcccccagctgctgatctacaggatgagcaacctggctagcggcgtgccagacagattcagcggcagcggctctggaaccgacttcaccctgaagatcagcagggtggaggccgaggacgtgggcgtgtactactgcctgcagcacctggaatacccctacaccttcggccaagggaccaagctggaaatcaagtccggaggtggtggatccgaggtgcagctggtcgagtctggaggaggattggtgcagcctggagggtcattgaaactctcatgtgcagcctctggattcaccttcaataagtacgccatgaactgggtccgccaggctccaggaaagggtttggaatgggttgctcgcataagaagtaaatataataattatgcaacatattatgccgattcagtgaaagacaggttcaccatctccagagatgattcaaaaaacactgcctatctacaaatgaacaacttgaaaactgaggacactgccgtgtactactgtgtgagacatgggaacttcggtaatagctacatatcctactgggcttactggggccaagggactctggtcaccgtctcctcaggtggtggtggttctggcggcggcggctccggtggtggtggttctcagactgttgtgactcaggaaccttcactcaccgtatcacctggtggaacagtcacactcacttgtggctcctcgactggggctgttacatctggcaactacccaaactgggtccaacaaaaaccaggtcaggcaccccgtggtctaataggtgggactaagttcctcgcccccggtactcctgccagattctcaggctccctgcttggaggcaaggctgccctcaccctctcaggggtacagccagaggatgaggcagaatattactgtgttctatggtacagcaaccgctgggtgttcggtggaggaaccaaactgactgtccta

SEQ ID NO: 1186 - protein, 117 aa, Artificial Sequence
  PC32D5-H
EVQLVQSGAEVVKPGATVKISCKVSGYTFTNYWLNWVKQAPGRGLEWIGRIDPSDSEIHYDQKFKDRVTITADKSTSTAYMELSSLRSEDTAVYYCALTGIYAMAYWGQGTTVTVSS

SEQ ID NO: 1187 - protein, 5 aa, Artificial Sequence
  PC32D5-HCDR1
NYWLN

SEQ ID NO: 1188 - protein, 17 aa, Artificial Sequence
  PC32D5-HCDR2
RIDPSDSEIHYDQKFKD

SEQ ID NO: 1189 - protein, 8 aa, Artificial Sequence
  PC32D5-HCDR3
TGIYAMAY

SEQ ID NO: 1190 - DNA, 351 bp, Artificial Sequence
  PC32D5-H
gaggtgcagctggtccagtcaggcgccgaagtggtgaagcctggcgccacagtgaagatatcctgcaaggtcagcggctacaccttcaccaactactggctgaactgggtgaaacaggcgcccggcaggggcctggaatggataggcaggatcgaccccagcgacagcgagatccactacgaccagaagttcaaggacagagtcaccataaccgcggacaagagcaccagcaccgcctacatggagctgtccagcctgagaagcgaggacaccgccgtgtactattgcgccctgaccggcatctacgccatggcctactggggccagggcaccacggtcaccgtctcctca

SEQ ID NO: 1191 - protein, 112 aa, Artificial Sequence
  PC32D5-L
DIVMTQSPLSLPVTPGESASISCRSSKSLLHSNGNTYLYWYLQKPGQSPQLLIYRMSNLASGVPDRFSGSGSGTDFTLRISRVEAEDVGVYYCLQHLEYPYTFGQGTKLEIK

SEQ ID NO: 1192 - protein, 16 aa, Artificial Sequence
  PC32D5-LCDR1
RSSKSLLHSNGNTYLY

SEQ ID NO: 1193 - protein, 7 aa, Artificial Sequence
  PC32D5-LCDR2
RMSNLAS

SEQ ID NO: 1194 - protein, 9 aa, Artificial Sequence
  PC32D5-LCDR3
LQHLEYPYT

SEQ ID NO: 1195 - DNA, 336 bp, Artificial Sequence
  PC32D5-L
gacatcgtgatgacccagtcacctctaagcctgccagtgaccccaggcgagtcagcgtccatcagctgcaggtccagcaagagcctgctgcacagcaacggcaacacctacctgtactggtatctgcagaagccaggccagagcccccagctgctgatctacaggatgagcaacctggctagcggcgtgccagacagattcagcggcagcggctctggaaccgacttcaccctgaggatcagcagggtggaggccgaggacgtgggcgtgtactactgcctgcagcacctggaatacccctacaccttcggccaagggaccaagctggaaatcaag

SEQ ID NO: 1196 - protein, 244 aa, Artificial Sequence
  PC32D5-HL
EVQLVQSGAEVVKPGATVKISCKVSGYTFTNYWLNWVKQAPGRGLEWIGRIDPSDSEIHYDQKFKDRVTITADKSTSTAYMELSSLRSEDTAVYYCALTGIYAMAYWGQGTTVTVSSGGGGSGGGGSGGGGSDIVMTQSPLSLPVTPGESASISCRSSKSLLHSNGNTYLYWYLQKPGQSPQLLIYRMSNLASGVPDRFSGSGSGTDFTLRISRVEAEDVGVYYCLQHLEYPYTFGQGTKLEIK

SEQ ID NO: 1197 - DNA, 732 bp, Artificial Sequence
  PC32D5-HL
gaggtgcagctggtccagtcaggcgccgaagtggtgaagcctggcgccacagtgaagatatcctgcaaggtcagcggctacaccttcaccaactactggctgaactgggtgaaacaggcgcccggcaggggcctggaatggataggcaggatcgaccccagcgacagcgagatccactacgaccagaagttcaaggacagagtcaccataaccgcggacaagagcaccagcaccgcctacatggagctgtccagcctgagaagcgaggacaccgccgtgtactattgcgccctgaccggcatctacgccatggcctactggggccagggcaccacggtcaccgtctcctcaggtggtggtggttctggcggcggcggctccggtggtggtggttctgacatcgtgatgacccagtcacctctaagcctgccagtgaccccaggcgagtcagcgtccatcagctgcaggtccagcaagagcctgctgcacagcaacggcaacacctacctgtactggtatctgcagaagccaggccagagcccccagctgctgatctacaggatgagcaacctggctagcggcgtgccagacagattcagcggcagcggctctggaaccgacttcaccctgaggatcagcagggtggaggccgaggacgtgggcgtgtactactgcctgcagcacctggaatacccctacaccttcggccaagggaccaagctggaaatcaag

SEQ ID NO: 1198 - protein, 499 aa, Artificial Sequence
  PC32D5 HL x I2C HL
EVQLVQSGAEVVKPGATVKISCKVSGYTFTNYWLNWVKQAPGRGLEWIGRIDPSDSEIHYDQKFKDRVTITADKSTSTAYMELSSLRSEDTAVYYCALTGIYAMAYWGQGTTVTVSSGGGGSGGGGSGGGGSDIVMTQSPLSLPVTPGESASISCRSSKSLLHSNGNTYLYWYLQKPGQSPQLLIYRMSNLASGVPDRFSGSGSGTDFTLRISRVEAEDVGVYYCLQHLEYPYTFGQGTKLEIKSGGGGSEVQLVESGGGLVQPGGSLKLSCAASGFTFNKYAMNWVRQAPGKGLEWVARIRSKYNNYATYYADSVKDRFTISRDDSKNTAYLQMNNLKTEDTAVYYCVRHGNFGNSYISYWAYWGQGTLVTVSSGGGGSGGGGSGGGGSQTVVTQEPSLTVSPGGTVTLTCGSSTGAVTSGNYPNWVQQKPGQAPRGLIGGTKFLAPGTPARFSGSLLGGKAALTLSGVQPEDEAEYYCVLWYSNRWVFGGGTKLTVL

SEQ ID NO: 1199 - DNA, 1497 bp, Artificial Sequence
  PC32D5 HL x I2C HL
gaggtgcagctggtccagtcaggcgccgaagtggtgaagcctggcgccacagtgaagatatcctgcaaggtcagcggctacaccttcaccaactactggctgaactgggtgaaacaggcgcccggcaggggcctggaatggataggcaggatcgaccccagcgacagcgagatccactacgaccagaagttcaaggacagagtcaccataaccgcggacaagagcaccagcaccgcctacatggagctgtccagcctgagaagcgaggacaccgccgtgtactattgcgccctgaccggcatctacgccatggcctactggggccagggcaccacggtcaccgtctcctcaggtggtggtggttctggcggcggcggctccggtggtggtggttctgacatcgtgatgacccagtcacctctaagcctgccagtgaccccaggcgagtcagcgtccatcagctgcaggtccagcaagagcctgctgcacagcaacggcaacacctacctgtactggtatctgcagaagccaggccagagcccccagctgctgatctacaggatgagcaacctggctagcggcgtgccagacagattcagcggcagcggctctggaaccgacttcaccctgaggatcagcagggtggaggccgaggacgtgggcgtgtactactgcctgcagcacctggaatacccctacaccttcggccaagggaccaagctggaaatcaagtccggaggtggtggatccgaggtgcagctggtcgagtctggaggaggattggtgcagcctggagggtcattgaaactctcatgtgcagcctctggattcaccttcaataagtacgccatgaactgggtccgccaggctccaggaaagggtttggaatgggttgctcgcataagaagtaaatataataattatgcaacatattatgccgattcagtgaaagacaggttcaccatctccagagatgattcaaaaaacactgcctatctacaaatgaacaacttgaaaactgaggacactgccgtgtactactgtgtgagacatgggaacttcggtaatagctacatatcctactgggcttactggggccaagggactctggtcaccgtctcctcaggtggtggtggttctggcggcggcggctccggtggtggtggttctcagactgttgtgactcaggaaccttcactcaccgtatcacctggtggaacagtcacactcacttgtggctcctcgactggggctgttacatctggcaactacccaaactgggtccaacaaaaaccaggtcaggcaccccgtggtctaataggtgggactaagttcctcgcccccggtactcctgccagattctcaggctccctgcttggaggcaaggctgccctcaccctctcaggggtacagccagaggatgaggcagaatattactgtgttctatggtacagcaaccgctgggtgttcggtggaggaaccaaactgactgtccta

SEQ ID NO: 1200 - protein, 117 aa, Artificial Sequence
  PC17D10-H
EVQLVQSGAEVKKPGATVKISCKVSGYTFTNYWLNWVKQTPGKGLEWIGRIDPSDSEIHYDQKFKDKVTITADKSTSTAYMELSSLRSEDTAVYYCALTGIYAMAYWGQGTTVTVSS

SEQ ID NO: 1201 - protein, 5 aa, Artificial Sequence
  PC17D10-HCDR1
NYWLN

SEQ ID NO: 1202 - protein, 17 aa, Artificial Sequence
  PC17D10-HCDR2
RIDPSDSEIHYDQKFKD

SEQ ID NO: 1203 - protein, 8 aa, Artificial Sequence
  PC17D10-HCDR3
TGIYAMAY

SEQ ID NO: 1204 - DNA, 351 bp, Artificial Sequence
  PC17D10-H
gaggtgcagctggtccagtcaggcgccgaagtgaagaagcctggcgccacagtgaagatatcctgcaaggtcagcggctacaccttcaccaactactggctgaactgggtgaaacagacgcccggcaagggcctggaatggataggcaggatcgaccccagcgacagcgagatccactacgaccagaagttcaaggacaaagtcaccataaccgcggacaagagcaccagcaccgcctacatggagctgtccagcctgagaagcgaggacaccgccgtgtactattgcgccctgaccggcatctacgccatggcctactggggccagggcaccacggtcaccgtctcctca

SEQ ID NO: 1205 - protein, 112 aa, Artificial Sequence
  PC17D10-L
DIVMTQAPLSLPVTPGEPVSISCRSSKSLLHSNGNTYLYWYLQKPGQSPQLLIYRMSNLASGVPDRFSGSGSGTDFTLRISRVEAEDVGVYYCLQHLEYPYTFGQGTKLEIK

SEQ ID NO: 1206 - protein, 16 aa, Artificial Sequence
  PC17D10-LCDR1
RSSKSLLHSNGNTYLY

SEQ ID NO: 1207 - protein, 7 aa, Artificial Sequence
  PC17D10-LCDR2
RMSNLAS

SEQ ID NO: 1208 - protein, 9 aa, Artificial Sequence
  PC17D10-LCDR3
LQHLEYPYT

SEQ ID NO: 1209 - DNA, 336 bp, Artificial Sequence
  PC17D10-L
gacatcgtgatgacccaggcacctctaagcctgccagtgaccccaggcgagccagtgtccatcagctgcaggtccagcaagagcctgctgcacagcaacggcaacacctacctgtactggtatctgcagaagccaggccagagcccccagctgctgatctacaggatgagcaacctggctagcggcgtgccagacagattcagcggcagcggctctggaaccgacttcaccctgaggatcagcagggtggaggccgaggacgtgggcgtgtactactgcctgcagcacctggaatacccctacaccttcggccaagggaccaagctggaaatcaag

SEQ ID NO: 1210 - protein, 244 aa, Artificial Sequence
  PC17D10-HL
EVQLVQSGAEVKKPGATVKISCKVSGYTFTNYWLNWVKQTPGKGLEWIGRIDPSDSEIHYDQKFKDKVTITADKSTSTAYMELSSLRSEDTAVYYCALTGIYAMAYWGQGTTVTVSSGGGGSGGGGSGGGGSDIVMTQAPLSLPVTPGEPVSISCRSSKSLLHSNGNTYLYWYLQKPGQSPQLLIYRMSNLASGVPDRFSGSGSGTDFTLRISRVEAEDVGVYYCLQHLEYPYTFGQGTKLEIK

SEQ ID NO: 1211 - DNA, 732 bp, Artificial Sequence
  PC17D10-HL
gaggtgcagctggtccagtcaggcgccgaagtgaagaagcctggcgccacagtgaagatatcctgcaaggtcagcggctacaccttcaccaactactggctgaactgggtgaaacagacgcccggcaagggcctggaatggataggcaggatcgaccccagcgacagcgagatccactacgaccagaagttcaaggacaaagtcaccataaccgcggacaagagcaccagcaccgcctacatggagctgtccagcctgagaagcgaggacaccgccgtgtactattgcgccctgaccggcatctacgccatggcctactggggccagggcaccacggtcaccgtctcctcaggtggtggtggttctggcggcggcggctccggtggtggtggttctgacatcgtgatgacccaggcacctctaagcctgccagtgaccccaggcgagccagtgtccatcagctgcaggtccagcaagagcctgctgcacagcaacggcaacacctacctgtactggtatctgcagaagccaggccagagcccccagctgctgatctacaggatgagcaacctggctagcggcgtgccagacagattcagcggcagcggctctggaaccgacttcaccctgaggatcagcagggtggaggccgaggacgtgggcgtgtactactgcctgcagcacctggaatacccctacaccttcggccaagggaccaagctggaaatcaag

SEQ ID NO: 1212 - protein, 499 aa, Artificial Sequence
  PC17D10 HL x I2C HL
EVQLVQSGAEVKKPGATVKISCKVSGYTFTNYWLNWVKQTPGKGLEWIGRIDPSDSEIHYDQKFKDKVTITADKSTSTAYMELSSLRSEDTAVYYCALTGIYAMAYWGQGTTVTVSSGGGGSGGGGSGGGGSDIVMTQAPLSLPVTPGEPVSISCRSSKSLLHSNGNTYLYWYLQKPGQSPQLLIYRMSNLASGVPDRFSGSGSGTDFTLRISRVEAEDVGVYYCLQHLEYPYTFGQGTKLEIKSGGGGSEVQLVESGGGLVQPGGSLKLSCAASGFTFNKYAMNWVRQAPGKGLEWVARIRSKYNNYATYYADSVKDRFTISRDDSKNTAYLQMNNLKTEDTAVYYCVRHGNFGNSYISYWAYWGQGTLVTVSSGGGGSGGGGSGGGGSQTVVTQEPSLTVSPGGTVTLTCGSSTGAVTSGNYPNWVQQKPGQAPRGLIGGTKFLAPGTPARFSGSLLGGKAALTLSGVQPEDEAEYYCVLWYSNRWVFGGGTKLTVL

SEQ ID NO: 1213 - DNA, 1497 bp, Artificial Sequence
  PC17D10 HL x I2C HL
gaggtgcagctggtccagtcaggcgccgaagtgaagaagcctggcgccacagtgaagatatcctgcaaggtcagcggctacaccttcaccaactactggctgaactgggtgaaacagacgcccggcaagggcctggaatggataggcaggatcgaccccagcgacagcgagatccactacgaccagaagttcaaggacaaagtcaccataaccgcggacaagagcaccagcaccgcctacatggagctgtccagcctgagaagcgaggacaccgccgtgtactattgcgccctgaccggcatctacgccatggcctactggggccagggcaccacggtcaccgtctcctcaggtggtggtggttctggcggcggcggctccggtggtggtggttctgacatcgtgatgacccaggcacctctaagcctgccagtgaccccaggcgagccagtgtccatcagctgcaggtccagcaagagcctgctgcacagcaacggcaacacctacctgtactggtatctgcagaagccaggccagagcccccagctgctgatctacaggatgagcaacctggctagcggcgtgccagacagattcagcggcagcggctctggaaccgacttcaccctgaggatcagcagggtggaggccgaggacgtgggcgtgtactactgcctgcagcacctggaatacccctacaccttcggccaagggaccaagctggaaatcaagtccggaggtggtggatccgaggtgcagctggtcgagtctggaggaggattggtgcagcctggagggtcattgaaactctcatgtgcagcctctggattcaccttcaataagtacgccatgaactgggtccgccaggctccaggaaagggtttggaatgggttgctcgcataagaagtaaatataataattatgcaacatattatgccgattcagtgaaagacaggttcaccatctccagagatgattcaaaaaacactgcctatctacaaatgaacaacttgaaaactgaggacactgccgtgtactactgtgtgagacatgggaacttcggtaatagctacatatcctactgggcttactggggccaagggactctggtcaccgtctcctcaggtggtggtggttctggcggcggcggctccggtggtggtggttctcagactgttgtgactcaggaaccttcactcaccgtatcacctggtggaacagtcacactcacttgtggctcctcgactggggctgttacatctggcaactacccaaactgggtccaacaaaaaccaggtcaggcaccccgtggtctaataggtgggactaagttcctcgcccccggtactcctgccagattctcaggctccctgcttggaggcaaggctgccctcaccctctcaggggtacagccagaggatgaggcagaatattactgtgttctatggtacagcaaccgctgggtgttcggtggaggaaccaaactgactgtccta

SEQ ID NO: 1214 - protein, 117 aa, Artificial Sequence
  PC16E12-H
EVQLVQSGAEVKKPGAPVKISCKVSGYTFTNYWLNWVKQRPGKGLEWIGRIDPSDSEIHYDQKFKDRVTITVDKSTSTAYIELSSLRSEDTAVYYCALTGIYAMAYWGQGTTVTVSS

SEQ ID NO: 1215 - protein, 5 aa, Artificial Sequence
  PC16E12-HCDR1
NYWLN

SEQ ID NO: 1216 - protein, 17 aa, Artificial Sequence
  PC16E12-HCDR2
RIDPSDSEIHYDQKFKD

SEQ ID NO: 1217 - protein, 8 aa, Artificial Sequence
  PC16E12-HCDR3
TGIYAMAY

SEQ ID NO: 1218 - DNA, 351 bp, Artificial Sequence
  PC16E12-H
gaggtgcagctggtccagtcaggcgccgaagtgaagaagcctggcgccccagtgaagatatcctgcaaggtcagcggctacaccttcaccaactactggctgaactgggtgaaacagaggcccggcaagggcctggaatggataggtaggatcgaccccagcgacagcgagatccactacgaccagaagttcaaggacagagtcaccataaccgtggacaagagcaccagcaccgcctacatcgagctgtccagcctgagaagcgaggacaccgccgtgtactattgcgccctgaccggcatctacgccatggcctactggggccagggcaccacggtcaccgtctcctca

SEQ ID NO: 1219 - protein, 112 aa, Artificial Sequence
  PC16E12-L
DIVMTQSPLSLPVTPGEPVSISCRSSKSLLHSNGNTYLYWYLQKPGQSPQLLIYRMSNLASGVPDRFSGSGSGTDFTLKISRVEAEDVGVYYCLQHLEYPYTFGQGTKLEIK

SEQ ID NO: 1220 - protein, 16 aa, Artificial Sequence
  PC16E12-LCDR1
RSSKSLLHSNGNTYLY

SEQ ID NO: 1221 - protein, 7 aa, Artificial Sequence
  PC16E12-LCDR2
RMSNLAS

SEQ ID NO: 1222 - protein, 9 aa, Artificial Sequence
  PC16E12-LCDR3
LQHLEYPYT

SEQ ID NO: 1223 - DNA, 336 bp, Artificial Sequence
  PC16E12-L
gacatcgtgatgacccagtcacctctaagcctgccagtgaccccaggcgagccagtgtccatcagctgcaggtccagcaagagcctgctgcacagcaacggcaacacctacctgtactggtatctgcagaagccaggccagagcccccagctgctgatctacaggatgagcaacctggctagcggcgtgccagacagattcagcggcagcggctctggaaccgacttcaccctgaagatcagcagggtggaggccgaggacgtgggcgtgtactactgcctgcagcacctggaatacccctacaccttcggccaagggaccaagctggaaatcaag

SEQ ID NO: 1224 - protein, 244 aa, Artificial Sequence
  PC16E12-HL
EVQLVQSGAEVKKPGAPVKISCKVSGYTFTNYWLNWVKQRPGKGLEWIGRIDPSDSEIHYDQKFKDRVTITVDKSTSTAYIELSSLRSEDTAVYYCALTGIYAMAYWGQGTTVTVSSGGGGSGGGGSGGGGSDIVMTQSPLSLPVTPGEPVSISCRSSKSLLHSNGNTYLYWYLQKPGQSPQLLIYRMSNLASGVPDRFSGSGSGTDFTLKISRVEAEDVGVYYCLQHLEYPYTFGQGTKLEIK

SEQ ID NO: 1225 - DNA, 732 bp, Artificial Sequence
  PC16E12-HL
gaggtgcagctggtccagtcaggcgccgaagtgaagaagcctggcgccccagtgaagatatcctgcaaggtcagcggctacaccttcaccaactactggctgaactgggtgaaacagaggcccggcaagggcctggaatggataggtaggatcgaccccagcgacagcgagatccactacgaccagaagttcaaggacagagtcaccataaccgtggacaagagcaccagcaccgcctacatcgagctgtccagcctgagaagcgaggacaccgccgtgtactattgcgccctgaccggcatctacgccatggcctactggggccagggcaccacggtcaccgtctcctcaggtggtggtggttctggcggcggcggctccggtggtggtggttctgacatcgtgatgacccagtcacctctaagcctgccagtgaccccaggcgagccagtgtccatcagctgcaggtccagcaagagcctgctgcacagcaacggcaacacctacctgtactggtatctgcagaagccaggccagagcccccagctgctgatctacaggatgagcaacctggctagcggcgtgccagacagattcagcggcagcggctctggaaccgacttcaccctgaagatcagcagggtggaggccgaggacgtgggcgtgtactactgcctgcagcacctggaatacccctacaccttcggccaagggaccaagctggaaatcaag

SEQ ID NO: 1226 - protein, 499 aa, Artificial Sequence
  PC16E12 HL x I2C HL
EVQLVQSGAEVKKPGAPVKISCKVSGYTFTNYWLNWVKQRPGKGLEWIGRIDPSDSEIHYDQKFKDRVTITVDKSTSTAYIELSSLRSEDTAVYYCALTGIYAMAYWGQGTTVTVSSGGGGSGGGGSGGGGSDIVMTQSPLSLPVTPGEPVSISCRSSKSLLHSNGNTYLYWYLQKPGQSPQLLIYRMSNLASGVPDRFSGSGSGTDFTLKISRVEAEDVGVYYCLQHLEYPYTFGQGTKLEIKSGGGGSEVQLVESGGGLVQPGGSLKLSCAASGFTFNKYAMNWVRQAPGKGLEWVARIRSKYNNYATYYADSVKDRFTISRDDSKNTAYLQMNNLKTEDTAVYYCVRHGNFGNSYISYWAYWGQGTLVTVSSGGGGSGGGGSGGGGSQTVVTQEPSLTVSPGGTVTLTCGSSTGAVTSGNYPNWVQQKPGQAPRGLIGGTKFLAPGTPARFSGSLLGGKAALTLSGVQPEDEAEYYCVLWYSNRWVFGGGTKLTVL

SEQ ID NO: 1227 - DNA, 1497 bp, Artificial Sequence
  PC16E12 HL x I2C HL
gaggtgcagctggtccagtcaggcgccgaagtgaagaagcctggcgccccagtgaagatatcctgcaaggtcagcggctacaccttcaccaactactggctgaactgggtgaaacagaggcccggcaagggcctggaatggataggtaggatcgaccccagcgacagcgagatccactacgaccagaagttcaaggacagagtcaccataaccgtggacaagagcaccagcaccgcctacatcgagctgtccagcctgagaagcgaggacaccgccgtgtactattgcgccctgaccggcatctacgccatggcctactggggccagggcaccacggtcaccgtctcctcaggtggtggtggttctggcggcggcggctccggtggtggtggttctgacatcgtgatgacccagtcacctctaagcctgccagtgaccccaggcgagccagtgtccatcagctgcaggtccagcaagagcctgctgcacagcaacggcaacacctacctgtactggtatctgcagaagccaggccagagcccccagctgctgatctacaggatgagcaacctggctagcggcgtgccagacagattcagcggcagcggctctggaaccgacttcaccctgaagatcagcagggtggaggccgaggacgtgggcgtgtactactgcctgcagcacctggaatacccctacaccttcggccaagggaccaagctggaaatcaagtccggaggtggtggatccgaggtgcagctggtcgagtctggaggaggattggtgcagcctggagggtcattgaaactctcatgtgcagcctctggattcaccttcaataagtacgccatgaactgggtccgccaggctccaggaaagggtttggaatgggttgctcgcataagaagtaaatataataattatgcaacatattatgccgattcagtgaaagacaggttcaccatctccagagatgattcaaaaaacactgcctatctacaaatgaacaacttgaaaactgaggacactgccgtgtactactgtgtgagacatgggaacttcggtaatagctacatatcctactgggcttactggggccaagggactctggtcaccgtctcctcaggtggtggtggttctggcggcggcggctccggtggtggtggttctcagactgttgtgactcaggaaccttcactcaccgtatcacctggtggaacagtcacactcacttgtggctcctcgactggggctgttacatctggcaactacccaaactgggtccaacaaaaaccaggtcaggcaccccgtggtctaataggtgggactaagttcctcgcccccggtactcctgccagattctcaggctccctgcttggaggcaaggctgccctcaccctctcaggggtacagccagaggatgaggcagaatattactgtgttctatggtacagcaaccgctgggtgttcggtggaggaaccaaactgactgtccta

SEQ ID NO: 1228 - protein, 117 aa, Artificial Sequence
  PC08F4-H
EVQLVQSGAEVKKPGATVKISCKVSGYTFTNYWLNWVQQRPGKGLEWIGRIDPSDSEIHYDQKFKDRVTLTADKSTSTAYMELSSLRSEDTAVYYCALTGIYAMAYWGQGTTVTVSS

SEQ ID NO: 1229 - protein, 5 aa, Artificial Sequence
  PC08F4-HCDR1
NYWLN

SEQ ID NO: 1230 - protein, 17 aa, Artificial Sequence
  PC08F4-HCDR2
RIDPSDSEIHYDQKFKD

SEQ ID NO: 1231 - protein, 8 aa, Artificial Sequence
  PC08F4-HCDR3
TGIYAMAY

SEQ ID NO: 1232 - DNA, 351 bp, Artificial Sequence
  PC08F4-H
gaggtgcagctggtccagtcaggcgccgaagtgaagaagcctggcgccacagtgaagatatcctgcaaggtcagcggctacaccttcaccaactactggctgaactgggtgcaacagaggcccggcaagggcctggaatggataggcaggatcgaccccagcgacagcgagatccactacgaccagaagttcaaggacagagtcaccctaaccgcggacaagagcaccagcaccgcctacatggagctgtccagcctgagaagcgaggacaccgccgtgtactattgcgccctgaccggcatctacgccatggcctactggggccagggcaccacggtcaccgtctcctca

SEQ ID NO: 1233 - protein, 112 aa, Artificial Sequence
  PC08F4-L
DIVMTQSPLSLPVTPGESASISCRSSKSLLHSNGNTYLYWYLQKPGQSPQLLIYRMSNLASGVPDRFSGSGSGTDFTLKISRVEAEDVGVYYCLQHLEYPYTFGQGTKLEIK

SEQ ID NO: 1234 - protein, 16 aa, Artificial Sequence
  PC08F4-LCDR1
RSSKSLLHSNGNTYLY

SEQ ID NO: 1235 - protein, 7 aa, Artificial Sequence
  PC08F4-LCDR2
RMSNLAS

SEQ ID NO: 1236 - protein, 9 aa, Artificial Sequence
  PC08F4-LCDR3
LQHLEYPYT

SEQ ID NO: 1237 - DNA, 336 bp, Artificial Sequence
  PC08F4-L
gacatcgtgatgacccagtcacctctaagcctgccagtgaccccaggcgagtcagcgtccatcagctgcaggtccagcaagagcctgctgcacagcaacggcaacacctacctgtactggtatctgcagaagccaggccagagcccccagctgctgatctacaggatgagcaacctggctagcggcgtgccagacagattcagcggcagcggctctggaaccgacttcaccctgaagatcagcagggtggaggccgaggacgtgggcgtgtactactgcctgcagcacctggaatacccctacaccttcggccaagggaccaagctggaaatcaag

SEQ ID NO: 1238 - protein, 244 aa, Artificial Sequence
  PC08F4-HL
EVQLVQSGAEVKKPGATVKISCKVSGYTFTNYWLNWVQQRPGKGLEWIGRIDPSDSEIHYDQKFKDRVTLTADKSTSTAYMELSSLRSEDTAVYYCALTGIYAMAYWGQGTTVTVSSGGGGSGGGGSGGGGSDIVMTQSPLSLPVTPGESASISCRSSKSLLHSNGNTYLYWYLQKPGQSPQLLIYRMSNLASGVPDRFSGSGSGTDFTLKISRVEAEDVGVYYCLQHLEYPYTFGQGTKLEIK

SEQ ID NO: 1239 - DNA, 732 bp, Artificial Sequence
  PC08F4-HL
gaggtgcagctggtccagtcaggcgccgaagtgaagaagcctggcgccacagtgaagatatcctgcaaggtcagcggctacaccttcaccaactactggctgaactgggtgcaacagaggcccggcaagggcctggaatggataggcaggatcgaccccagcgacagcgagatccactacgaccagaagttcaaggacagagtcaccctaaccgcggacaagagcaccagcaccgcctacatggagctgtccagcctgagaagcgaggacaccgccgtgtactattgcgccctgaccggcatctacgccatggcctactggggccagggcaccacggtcaccgtctcctcaggtggtggtggttctggcggcggcggctccggtggtggtggttctgacatcgtgatgacccagtcacctctaagcctgccagtgaccccaggcgagtcagcgtccatcagctgcaggtccagcaagagcctgctgcacagcaacggcaacacctacctgtactggtatctgcagaagccaggccagagcccccagctgctgatctacaggatgagcaacctggctagcggcgtgccagacagattcagcggcagcggctctggaaccgacttcaccctgaagatcagcagggtggaggccgaggacgtgggcgtgtactactgcctgcagcacctggaatacccctacaccttcggccaagggaccaagctggaaatcaag

SEQ ID NO: 1240 - protein, 499 aa, Artificial Sequence
  PC08F4 HL x I2C HL
EVQLVQSGAEVKKPGATVKISCKVSGYTFTNYWLNWVQQRPGKGLEWIGRIDPSDSEIHYDQKFKDRVTLTADKSTSTAYMELSSLRSEDTAVYYCALTGIYAMAYWGQGTTVTVSSGGGGSGGGGSGGGGSDIVMTQSPLSLPVTPGESASISCRSSKSLLHSNGNTYLYWYLQKPGQSPQLLIYRMSNLASGVPDRFSGSGSGTDFTLKISRVEAEDVGVYYCLQHLEYPYTFGQGTKLEIKSGGGGSEVQLVESGGGLVQPGGSLKLSCAASGFTFNKYAMNWVRQAPGKGLEWVARIRSKYNNYATYYADSVKDRFTISRDDSKNTAYLQMNNLKTEDTAVYYCVRHGNFGNSYISYWAYWGQGTLVTVSSGGGGSGGGGSGGGGSQTVVTQEPSLTVSPGGTVTLTCGSSTGAVTSGNYPNWVQQKPGQAPRGLIGGTKFLAPGTPARFSGSLLGGKAALTLSGVQPEDEAEYYCVLWYSNRWVFGGGTKLTVL

SEQ ID NO: 1241 - DNA, 1497 bp, Artificial Sequence
  PC08F4 HL x I2C HL
gaggtgcagctggtccagtcaggcgccgaagtgaagaagcctggcgccacagtgaagatatcctgcaaggtcagcggctacaccttcaccaactactggctgaactgggtgcaacagaggcccggcaagggcctggaatggataggcaggatcgaccccagcgacagcgagatccactacgaccagaagttcaaggacagagtcaccctaaccgcggacaagagcaccagcaccgcctacatggagctgtccagcctgagaagcgaggacaccgccgtgtactattgcgccctgaccggcatctacgccatggcctactggggccagggcaccacggtcaccgtctcctcaggtggtggtggttctggcggcggcggctccggtggtggtggttctgacatcgtgatgacccagtcacctctaagcctgccagtgaccccaggcgagtcagcgtccatcagctgcaggtccagcaagagcctgctgcacagcaacggcaacacctacctgtactggtatctgcagaagccaggccagagcccccagctgctgatctacaggatgagcaacctggctagcggcgtgccagacagattcagcggcagcggctctggaaccgacttcaccctgaagatcagcagggtggaggccgaggacgtgggcgtgtactactgcctgcagcacctggaatacccctacaccttcggccaagggaccaagctggaaatcaagtccggaggtggtggatccgaggtgcagctggtcgagtctggaggaggattggtgcagcctggagggtcattgaaactctcatgtgcagcctctggattcaccttcaataagtacgccatgaactgggtccgccaggctccaggaaagggtttggaatgggttgctcgcataagaagtaaatataataattatgcaacatattatgccgattcagtgaaagacaggttcaccatctccagagatgattcaaaaaacactgcctatctacaaatgaacaacttgaaaactgaggacactgccgtgtactactgtgtgagacatgggaacttcggtaatagctacatatcctactgggcttactggggccaagggactctggtcaccgtctcctcaggtggtggtggttctggcggcggcggctccggtggtggtggttctcagactgttgtgactcaggaaccttcactcaccgtatcacctggtggaacagtcacactcacttgtggctcctcgactggggctgttacatctggcaactacccaaactgggtccaacaaaaaccaggtcaggcaccccgtggtctaataggtgggactaagttcctcgcccccggtactcctgccagattctcaggctccctgcttggaggcaaggctgccctcaccctctcaggggtacagccagaggatgaggcagaatattactgtgttctatggtacagcaaccgctgggtgttcggtggaggaaccaaactgactgtccta

SEQ ID NO: 1242 - protein, 117 aa, Artificial Sequence
  PC17F5-H
EVQLVQSGAEVMKPGATVKISCKVSGYTFTNYWLNWVKQAPGKGLEWIGRIDPSDSEIHYDQKFKDRVTITANKSTSTAYMELSSLTSEDTAVYYCALTGIYAMAYWGQGTTVTVSS

SEQ ID NO: 1243 - protein, 5 aa, Artificial Sequence
  PC17F5-HCDR1
NYWLN

SEQ ID NO: 1244 - protein, 17 aa, Artificial Sequence
  PC17F5-HCDR2
RIDPSDSEIHYDQKFKD

SEQ ID NO: 1245 - protein, 8 aa, Artificial Sequence
  PC17F5-HCDR3
TGIYAMAY

SEQ ID NO: 1246 - DNA, 372 bp, Artificial Sequence
  PC17F5-H
caggtgcagctggtccagtcaggacctgaggtgatgaagcctggggcttcagtgaagatgtcctgcaaggcttctggatacacattcactgactatgttatacactgggtgaggcaggcacctggaaagcgccttgagtggatgggatatattaatccttatgatgatgatactacctacaaccagaagttcaagggccgggtcacaattactgtagacaaatccgccagcacagcctacatggaactcaacagcctgacatctgaggacactgcagtctattactgtgcaagaagggggaactcctatgatggttacttcgactattctatggactactggggtcaaggaaccttggtcaccgtctcctca

SEQ ID NO: 1247 - protein, 112 aa, Artificial Sequence; identical to SEQ ID NO: 1219
  PC17F5-L

SEQ ID NO: 1248 - protein, 16 aa, Artificial Sequence
  PC17F5-LCDR1
RSSKSLLHSNGNTYLY

SEQ ID NO: 1249 - protein, 7 aa, Artificial Sequence
  PC17F5-LCDR2
RMSNLAS

SEQ ID NO: 1250 - protein, 9 aa, Artificial Sequence
  PC17F5-LCDR3
LQHLEYPYT

SEQ ID NO: 1251 - protein, 324 aa, Artificial Sequence
  PC17F5-L
GACATCCAGCTGACCCAGTCTCCAAGCTTCATGTCCGCATCAGTAGGAGACAGAGTCACCATCACCTGCAGGGCCAGTCAGAATGTGGGTACTGCTGTAGCCTGGTATCAACAGAAACCAGGACAAGCCCCTAAATTACTGATTTACTCGGCATCGAATCGGTACACTGGAGTCCCTAGTCGCTTCTCAGGCAGTGGATCTGGGACAGAGTTCACTCTCACCATCAGCAGTCTGCAGTCTGAAGACTTCGCAACTTATTACTGCCAGCAATATACCAACTATCCCATGTATACGTTTGGACAGGGGACCAAGCTGGAAATAAAA

SEQ ID NO: 1252 - protein, 244 aa, Artificial Sequence
  PC17F5-HL
EVQLVQSGAEVMKPGATVKISCKVSGYTFTNYWLNWVKQAPGKGLEWIGRIDPSDSEIHYDQKFKDRVTITANKSTSTAYMELSSLTSEDTAVYYCALTGIYAMAYWGQGTTVTVSSGGGGSGGGGSGGGGSDIVMTQSPLSLPVTPGEPVSISCRSSKSLLHSNGNTYLYWYLQKPGQSPQLLIYRMSNLASGVPDRFSGSGSGTDFTLKISRVEAEDVGVYYCLQHLEYPYTFGQGTKLEIK

SEQ ID NO: 1253 - DNA, 732 bp, Artificial Sequence
  PC17F5-HL
gaggtgcagctggtccagtcaggcgccgaagtgatgaagcctggcgccacagtgaagatatcctgcaaggtcagcggctacaccttcaccaactactggctgaactgggtgaaacaggcgcccggcaagggcctggaatggataggcaggatcgaccccagcgacagcgagatccactacgaccagaagttcaaggacagagtcaccataaccgcgaacaagagcaccagcaccgcctacatggagctgtccagcctgacaagcgaggacaccgccgtgtactattgcgccctgaccggcatctacgccatggcctactggggccagggcaccacggtcaccgtctcctcaggtggtggtggttctggcggcggcggctccggtggtggtggttctgacatcgtgatgacccagtcacctctaagcctgccagtgaccccaggcgagccagtgtccatcagctgcaggtccagcaagagcctgctgcacagcaacggcaacacctacctgtactggtatctgcagaagccaggccagagcccccagctgctgatctacaggatgagcaacctggctagcggcgtgccagacagattcagcggcagcggctctggaaccgacttcaccctgaagatcagcagggtggaggccgaggacgtgggcgtgtactactgcctgcagcacctggaatacccctacaccttcggccaagggaccaagctggaaatcaag

SEQ ID NO: 1254 - protein, 499 aa, Artificial Sequence
  PC17F5 HL x I2C HL
EVQLVQSGAEVMKPGATVKISCKVSGYTFTNYWLNWVKQAPGKGLEWIGRIDPSDSEIHYDQKFKDRVTITANKSTSTAYMELSSLTSEDTAVYYCALTGIYAMAYWGQGTTVTVSSGGGGSGGGGSGGGGSDIVMTQSPLSLPVTPGEPVSISCRSSKSLLHSNGNTYLYWYLQKPGQSPQLLIYRMSNLASGVPDRFSGSGSGTDFTLKISRVEAEDVGVYYCLQHLEYPYTFGQGTKLEIKSGGGGSEVQLVESGGGLVQPGGSLKLSCAASGFTFNKYAMNWVRQAPGKGLEWVARIRSKYNNYATYYADSVKDRFTISRDDSKNTAYLQMNNLKTEDTAVYYCVRHGNFGNSYISYWAYWGQGTLVTVSSGGGGSGGGGSGGGGSQTVVTQEPSLTVSPGGTVTLTCGSSTGAVTSGNYPNWVQQKPGQAPRGLIGGTKFLAPGTPARFSGSLLGGKAALTLSGVQPEDEAEYYCVLWYSNRWVFGGGTKLTVL

SEQ ID NO: 1255 - DNA, 1497 bp, Artificial Sequence
  PC17F5 HL x I2C HL
gaggtgcagctggtccagtcaggcgccgaagtgatgaagcctggcgccacagtgaagatatcctgcaaggtcagcggctacaccttcaccaactactggctgaactgggtgaaacaggcgcccggcaagggcctggaatggataggcaggatcgaccccagcgacagcgagatccactacgaccagaagttcaaggacagagtcaccataaccgcgaacaagagcaccagcaccgcctacatggagctgtccagcctgacaagcgaggacaccgccgtgtactattgcgccctgaccggcatctacgccatggcctactggggccagggcaccacggtcaccgtctcctcaggtggtggtggttctggcggcggcggctccggtggtggtggttctgacatcgtgatgacccagtcacctctaagcctgccagtgaccccaggcgagccagtgtccatcagctgcaggtccagcaagagcctgctgcacagcaacggcaacacctacctgtactggtatctgcagaagccaggccagagcccccagctgctgatctacaggatgagcaacctggctagcggcgtgccagacagattcagcggcagcggctctggaaccgacttcaccctgaagatcagcagggtggaggccgaggacgtgggcgtgtactactgcctgcagcacctggaatacccctacaccttcggccaagggaccaagctggaaatcaagtccggaggtggtggatccgaggtgcagctggtcgagtctggaggaggattggtgcagcctggagggtcattgaaactctcatgtgcagcctctggattcaccttcaataagtacgccatgaactgggtccgccaggctccaggaaagggtttggaatgggttgctcgcataagaagtaaatataataattatgcaacatattatgccgattcagtgaaagacaggttcaccatctccagagatgattcaaaaaacactgcctatctacaaatgaacaacttgaaaactgaggacactgccgtgtactactgtgtgagacatgggaacttcggtaatagctacatatcctactgggcttactggggccaagggactctggtcaccgtctcctcaggtggtggtggttctggcggcggcggctccggtggtggtggttctcagactgttgtgactcaggaaccttcactcaccgtatcacctggtggaacagtcacactcacttgtggctcctcgactggggctgttacatctggcaactacccaaactgggtccaacaaaaaccaggtcaggcaccccgtggtctaataggtgggactaagttcctcgcccccggtactcctgccagattctcaggctccctgcttggaggcaaggctgccctcaccctctcaggggtacagccagaggatgaggcagaatattactgtgttctatggtacagcaaccgctgggtgttcggtggaggaaccaaactgactgtccta

SEQ ID NO: 1256 - protein, 117 aa, Artificial Sequence
  PC17H10-H
EVQLVQSGAEVKKPGATVKISCKVSGYTFTNYWLNWVKQTPGKGLEWMGRIDPSDSEIHYDQKFKDRVTLTADTSTDTAYMELSSLTSEDTAVYYCALTGIYAMAYWGQGTTVTVSS

SEQ ID NO: 1257 - protein, 5 aa, Artificial Sequence
  PC17H10-HCDR1
NYWLN

SEQ ID NO: 1258 - protein, 17 aa, Artificial Sequence
  PC17H10-HCDR2
RIDPSDSEIHYDQKFKD

SEQ ID NO: 1259 - protein, 8 aa, Artificial Sequence
  PC17H10-HCDR3
TGIYAMAY

SEQ ID NO: 1260 - DNA, 351 bp, Artificial Sequence
  PC17H10-H
gaggtgcagctggtccagtcaggcgccgaagtgaagaagcctggcgccacagtgaagatatcctgcaaggtcagcggctacaccttcaccaactactggctgaactgggtgaaacagacgcccggcaagggcctggaatggatgggcaggatcgaccccagcgacagcgagatccactacgaccagaagttcaaggacagagtcaccctaaccgcggacacgagcaccgacaccgcctacatggagctgtccagcctgacaagcgaggacaccgccgtgtactattgcgccctgaccggcatctacgccatggcctactggggccagggcaccacggtcaccgtctcctca

SEQ ID NO: 1261 - protein, 112 aa, Artificial Sequence
  PC17H10-L
DIVMTQAPLSLPVTPGEPASISCRSSKSLLHSNGNTYLYWYLQKPGQSPQLLIYRMSNLASGVPDRFSGSGSGTDFTLKISRVEAEDVGVYYCLQHLEYPYTFGQGTKLEIK

SEQ ID NO: 1262 - protein, 16 aa, Artificial Sequence
  PC17H10-LCDR1
RSSKSLLHSNGNTYLY

SEQ ID NO: 1263 - protein, 7 aa, Artificial Sequence
  PC17H10-LCDR2
RMSNLAS

SEQ ID NO: 1264 - protein, 9 aa, Artificial Sequence
  PC17H10-LCDR3
LQHLEYPYT

SEQ ID NO: 1265 - DNA, 336 bp, Artificial Sequence
  PC17H10-L
gacatcgtgatgacccaggcacctctaagcctgccagtgaccccaggcgagccagcgtccatcagctgcaggtccagcaagagcctgctgcacagcaacggcaacacctacctgtactggtatctgcagaagccaggccagagcccccagctgctgatctacaggatgagcaacctggctagcggcgtgccagacagattcagcggcagcggctctggaaccgacttcaccctgaagatcagcagggtggaggccgaggacgtgggcgtgtactactgcctgcagcacctggaatacccctacaccttcggccaagggaccaagctggaaatcaag

SEQ ID NO: 1266 - protein, 244 aa, Artificial Sequence
  PC17H10-HL
EVQLVQSGAEVKKPGATVKISCKVSGYTFTNYWLNWVKQTPGKGLEWMGRIDPSDSEIHYDQKFKDRVTLTADTSTDTAYMELSSLTSEDTAVYYCALTGIYAMAYWGQGTTVTVSSGGGGSGGGGSGGGGSDIVMTQAPLSLPVTPGEPASISCRSSKSLLHSNGNTYLYWYLQKPGQSPQLLIYRMSNLASGVPDRFSGSGSGTDFTLKISRVEAEDVGVYYCLQHLEYPYTFGQGTKLEIK

SEQ ID NO: 1267 - DNA, 732 bp, Artificial Sequence
  PC17H10-HL
gaggtgcagctggtccagtcaggcgccgaagtgaagaagcctggcgccacagtgaagatatcctgcaaggtcagcggctacaccttcaccaactactggctgaactgggtgaaacagacgcccggcaagggcctggaatggatgggcaggatcgaccccagcgacagcgagatccactacgaccagaagttcaaggacagagtcaccctaaccgcggacacgagcaccgacaccgcctacatggagctgtccagcctgacaagcgaggacaccgccgtgtactattgcgccctgaccggcatctacgccatggcctactggggccagggcaccacggtcaccgtctcctcaggtggtggtggttctggcggcggcggctccggtggtggtggttctgacatcgtgatgacccaggcacctctaagcctgccagtgaccccaggcgagccagcgtccatcagctgcaggtccagcaagagcctgctgcacagcaacggcaacacctacctgtactggtatctgcagaagccaggccagagcccccagctgctgatctacaggatgagcaacctggctagcggcgtgccagacagattcagcggcagcggctctggaaccgacttcaccctgaagatcagcagggtggaggccgaggacgtgggcgtgtactactgcctgcagcacctggaatacccctacaccttcggccaagggaccaagctggaaatcaag

SEQ ID NO: 1268 - protein, 499 aa, Artificial Sequence
  PC17H10 HL X I2C HL
EVQLVQSGAEVKKPGATVKISCKVSGYTFTNYWLNWVKQTPGKGLEWMGRIDPSDSEIHYDQKFKDRVTLTADTSTDTAYMELSSLTSEDTAVYYCALTGIYAMAYWGQGTTVTVSSGGGGSGGGGSGGGGSDIVMTQAPLSLPVTPGEPASISCRSSKSLLHSNGNTYLYWYLQKPGQSPQLLIYRMSNLASGVPDRFSGSGSGTDFTLKISRVEAEDVGVYYCLQHLEYPYTFGQGTKLEIKSGGGGSEVQLVESGGGLVQPGGSLKLSCAASGFTFNKYAMNWVRQAPGKGLEWVARIRSKYNNYATYYADSVKDRFTISRDDSKNTAYLQMNNLKTEDTAVYYCVRHGNFGNSYISYWAYWGQGTLVTVSSGGGGSGGGGSGGGGSQTVVTQEPSLTVSPGGTVTLTCGSSTGAVTSGNYPNWVQQKPGQAPRGLIGGTKFLAPGTPARFSGSLLGGKAALTLSGVQPEDEAEYYCVLWYSNRWVFGGGTKLTVL

SEQ ID NO: 1269 - DNA, 1497 bp, Artificial Sequence
  PC17H10 HL X I2C HL
gaggtgcagctggtccagtcaggcgccgaagtgaagaagcctggcgccacagtgaagatatcctgcaaggtcagcggctacaccttcaccaactactggctgaactgggtgaaacagacgcccggcaagggcctggaatggatgggcaggatcgaccccagcgacagcgagatccactacgaccagaagttcaaggacagagtcaccctaaccgcggacacgagcaccgacaccgcctacatggagctgtccagcctgacaagcgaggacaccgccgtgtactattgcgccctgaccggcatctacgccatggcctactggggccagggcaccacggtcaccgtctcctcaggtggtggtggttctggcggcggcggctccggtggtggtggttctgacatcgtgatgacccaggcacctctaagcctgccagtgaccccaggcgagccagcgtccatcagctgcaggtccagcaagagcctgctgcacagcaacggcaacacctacctgtactggtatctgcagaagccaggccagagcccccagctgctgatctacaggatgagcaacctggctagcggcgtgccagacagattcagcggcagcggctctggaaccgacttcaccctgaagatcagcagggtggaggccgaggacgtgggcgtgtactactgcctgcagcacctggaatacccctacaccttcggccaagggaccaagctggaaatcaagtccggaggtggtggatccgaggtgcagctggtcgagtctggaggaggattggtgcagcctggagggtcattgaaactctcatgtgcagcctctggattcaccttcaataagtacgccatgaactgggtccgccaggctccaggaaagggtttggaatgggttgctcgcataagaagtaaatataataattatgcaacatattatgccgattcagtgaaagacaggttcaccatctccagagatgattcaaaaaacactgcctatctacaaatgaacaacttgaaaactgaggacactgccgtgtactactgtgtgagacatgggaacttcggtaatagctacatatcctactgggcttactggggccaagggactctggtcaccgtctcctcaggtggtggtggttctggcggcggcggctccggtggtggtggttctcagactgttgtgactcaggaaccttcactcaccgtatcacctggtggaacagtcacactcacttgtggctcctcgactggggctgttacatctggcaactacccaaactgggtccaacaaaaaccaggtcaggcaccccgtggtctaataggtgggactaagttcctcgcccccggtactcctgccagattctcaggctccctgcttggaggcaaggctgccctcaccctctcaggggtacagccagaggatgaggcagaatattactgtgttctatggtacagcaaccgctgggtgttcggtggaggaaccaaactgactgtccta

SEQ ID NO: 1270 - protein, 124 aa, Artificial Sequence
  hCD19 5-A9-H
QVQLVQSGAEVVRPGASVKISCKASGYAFTSYWMNWVRQRPGQGLEWIGQIWPGDGDTNYNGKFKGRVTMTADESTSTAYMELSSLRSEDTAVYYCARRETTTVGRYYYAMDYWGQGTTVTVSS

SEQ ID NO: 1271 - protein, 5 aa, Artificial Sequence
  hCD19 5-A9-HCDR1
SYWMN

SEQ ID NO: 1272 - protein, 17 aa, Artificial Sequence
  hCD19 5-A9-HCDR2
QIWPGDGDTNYNGKFKG

SEQ ID NO: 1273 - protein, 15 aa, Artificial Sequence
  hCD19 5-A9-HCDR3
RETTTVGRYYYAMDY

SEQ ID NO: 1274 - DNA, 372 bp, Artificial Sequence
  hCD19 5-A9-H
caggtgcagctggtccagtctggggctgaggtggtgaggcctggggcctcagtgaagatttcctgcaaggcttctggctatgcattcactagctactggatgaactgggtgaggcagcgccctggacagggtcttgagtggattggacagatttggcctggagatggtgatactaactacaatggaaagttcaagggtagagtcactatgactgctgacgaatccaccagcacagcctacatggaactcagcagcctgcgatctgaggacactgcggtctattactgtgcaagacgggagactacgacggtaggccgttattactatgctatggactactggggccaagggaccacggtcaccgtctcctca

SEQ ID NO: 1275 - protein, 111 aa, Artificial Sequence
  hCD19 5-A9-L
DIQMTQSPSSLSVSVGERVTITCKASQSVDYDGTSYLNWYQQKPGQAPKLLIYDASNLVSGVPSRFSGSGSGTDFTLTISSLQKEDFATYYCQQSTEDPWTFGQGTKVEIK

SEQ ID NO: 1276 - protein, 15 aa, Artificial Sequence
  hCD19 5-A9-LCDR1
KASQSVDYDGTSYLN

SEQ ID NO: 1277 - protein, 7 aa, Artificial Sequence
  hCD19 5-A9-LCDR2
DASNLVS

SEQ ID NO: 1278 - protein, 9 aa, Artificial Sequence
  hCD19 5-A9-LCDR3
QQSTEDPWT

SEQ ID NO: 1279 - DNA, 333 bp, Artificial Sequence
  hCD19 5-A9-L
gacatccagatgacccagtctccatcttctttgtctgtgtctgtaggggagagagtcaccatcacctgcaaggccagccaaagtgttgattatgatggtaccagttatttgaactggtaccaacagaaaccaggacaggcacccaaactcctcatctatgatgcatccaatctagtttctggggtcccatccaggtttagtggcagtgggtctgggacagacttcaccctcaccatcagttctctgcagaaggaggatttcgcaacctattactgtcagcaaagtactgaggatccgtggacgttcggtcaagggaccaaggtggagatcaaa

SEQ ID NO: 1280 - protein, 250 aa, Artificial Sequence
  hCD19 5-A9-LH
DIQMTQSPSSLSVSVGERVTITCKASQSVDYDGTSYLNWYQQKPGQAPKLLIYDASNLVSGVPSRFSGSGSGTDFTLTISSLQKEDFATYYCQQSTEDPWTFGQGTKVEIKGGGGSGGGGSGGGGSQVQLVQSGAEVVRPGASVKISCKASGYAFTSYWMNWVRQRPGQGLEWIGQIWPGDGDTNYNGKFKGRVTMTADESTSTAYMELSSLRSEDTAVYYCARRETTTVGRYYYAMDYWGQGTTVTVSS

SEQ ID NO: 1281 - DNA, 750 bp, Artificial Sequence
  hCD19 5-A9-LH
gacatccagatgacccagtctccatcttctttgtctgtgtctgtaggggagagagtcaccatcacctgcaaggccagccaaagtgttgattatgatggtaccagttatttgaactggtaccaacagaaaccaggacaggcacccaaactcctcatctatgatgcatccaatctagtttctggggtcccatccaggtttagtggcagtgggtctgggacagacttcaccctcaccatcagttctctgcagaaggaggatttcgcaacctattactgtcagcaaagtactgaggatccgtggacgttcggtcaagggaccaaggtggagatcaaaggtggtggtggttctggcggcggcggctccggtggtggtggttctcaggtgcagctggtccagtctggggctgaggtggtgaggcctggggcctcagtgaagatttcctgcaaggcttctggctatgcattcactagctactggatgaactgggtgaggcagcgccctggacagggtcttgagtggattggacagatttggcctggagatggtgatactaactacaatggaaagttcaagggtagagtcactatgactgctgacgaatccaccagcacagcctacatggaactcagcagcctgcgatctgaggacactgcggtctattactgtgcaagacgggagactacgacggtaggccgttattactatgctatggactactggggccaagggaccacggtcaccgtctcctca

SEQ ID NO: 1282 - protein, 504 aa, Artificial Sequence
  hCD19 5-A9 LH x I2C HL
DIQMTQSPSSLSVSVGERVTITCKASQSVDYDGTSYLNWYQQKPGQAPKLLIYDASNLVSGVPSRFSGSGSGTDFTLTISSLQKEDFATYYCQQSTEDPWTFGQGTKVEIKGGGGSGGGGSGGGGSQVQLVQSGAEVVRPGASVKISCKASGYAFTSYWMNWVRQRPGQGLEWIGQIWPGDGDTNYNGKFKGRVTMTADESTSTAYMELSSLRSEDTAVYYCARRETTTVGRYYYAMDYWGQGTTVTVSSGGGGSEVQLVESGGGLVQPGGSLKLSCAASGFTFNKYAMNWVRQAPGKGLEWVARIRSKYNNYATYYADSVKDRFTISRDDSKNTAYLQMNNLKTEDTAVYYCVRHGNFGNSYISYWAYWGQGTLVTVSSGGGGSGGGGSGGGGSQTVVTQEPSLTVSPGGTVTLTCGSSTGAVTSGNYPNWVQQKPGQAPRGLIGGTKFLAPGTPARFSGSLLGGKAALTLSGVQPEDEAEYYCVLWYSNRWVFGGGTKLTVL

SEQ ID NO: 1283 - DNA, 1512 bp, Artificial Sequence
  hCD19 5-A9 LH x I2C HL
gacatccagatgacccagtctccatcttctttgtctgtgtctgtaggggagagagtcaccatcacctgcaaggccagccaaagtgttgattatgatggtaccagttatttgaactggtaccaacagaaaccaggacaggcacccaaactcctcatctatgatgcatccaatctagtttctggggtcccatccaggtttagtggcagtgggtctgggacagacttcaccctcaccatcagttctctgcagaaggaggatttcgcaacctattactgtcagcaaagtactgaggatccgtggacgttcggtcaagggaccaaggtggagatcaaaggtggtggtggttctggcggcggcggctccggtggtggtggttctcaggtgcagctggtccagtctggggctgaggtggtgaggcctggggcctcagtgaagatttcctgcaaggcttctggctatgcattcactagctactggatgaactgggtgaggcagcgccctggacagggtcttgagtggattggacagatttggcctggagatggtgatactaactacaatggaaagttcaagggtagagtcactatgactgctgacgaatccaccagcacagcctacatggaactcagcagcctgcgatctgaggacactgcggtctattactgtgcaagacgggagactacgacggtaggccgttattactatgctatggactactggggccaagggaccacggtcaccgtctcctccggaggtggtggatccgaggtgcagctggtcgagtctggaggaggattggtgcagcctggagggtcattgaaactctcatgtgcagcctctggattcaccttcaataagtacgccatgaactgggtccgccaggctccaggaaagggtttggaatgggttgctcgcataagaagtaaatataataattatgcaacatattatgccgattcagtgaaagacaggttcaccatctccagagatgattcaaaaaacactgcctatctacaaatgaacaacttgaaaactgaggacactgccgtgtactactgtgtgagacatgggaacttcggtaatagctacatatcctactgggcttactggggccaagggactctggtcaccgtctcctcaggtggtggtggttctggcggcggcggctccggtggtggtggttctcagactgttgtgactcaggaaccttcactcaccgtatcacctggtggaacagtcacactcacttgtggctcctcgactggggctgttacatctggcaactacccaaactgggtccaacaaaaaccaggtcaggcaccccgtggtctaataggtgggactaagttcctcgcccccggtactcctgccagattctcaggctccctgcttggaggcaaggctgccctcaccctctcaggggtacagccagaggatgaggcagaatattactgtgttctatggtacagcaaccgctgggtgttcggtggaggaaccaaactgactgtccta

SEQ ID NO: 1284 - protein, 124 aa, Artificial Sequence
  hCD19 2-C6-H
QVQLVQSGAEVKKPGASVKISCKASGYAFTSYWMNWVRQAPGQGLEWIGQIWPGDGDTNYNGKFKGRVTLTADTSTSTAYMELSSLQSEDTAVYYCARRETTTVGRYYYAMDYWGQGTTVTVSS

SEQ ID NO: 1285 - protein, 5 aa, Artificial Sequence
  hCD19 2-C6-HCDR1
SYWMN

SEQ ID NO: 1286 - protein, 17 aa, Artificial Sequence
  hCD19 2-C6-HCDR2
QIWPGDGDTNYNGKFKG

SEQ ID NO: 1287 - protein, 15 aa, Artificial Sequence
  hCD19 2-C6-HCDR3
RETTTVGRYYYAMDY

SEQ ID NO: 1288 - DNA, 372 bp, Artificial Sequence
  hCD19 2-C6-H
caggtgcagctggtccagtctggggctgaggtgaagaagcctggggcctcagtgaagatttcctgcaaggcttctggctatgcattcactagctactggatgaactgggtgaggcaggcccctggacagggtcttgagtggattggacagatttggcctggagatggtgatactaactacaatggaaagttcaagggtagagtcactctgactgctgacacatccaccagcacagcctacatggaactcagcagcctacaatctgaggacactgcggtctattactgtgcaagacgggagactacgacggtaggccgttattactatgctatggactactggggccaagggaccacggtcaccgtctcctca

SEQ ID NO: 1289 - protein, 111 aa, Artificial Sequence
  hCD19 2-C6-L
DIQMTQSPSSLSASVGERVTITCKASQSVDYDGSSYLNWYQQKPGKAPKLLIYDASNLVSGVPPRFSGSGSGTDFTLTIHSLQPEDFATYYCQQSTEDPWTFGQGTKVEIK

SEQ ID NO: 1290 - protein, 15 aa, Artificial Sequence
  hCD19 2-C6-LCDR1
KASQSVDYDGSSYLN

SEQ ID NO: 1291 - protein, 7 aa, Artificial Sequence
  hCD19 2-C6-LCDR2
DASNLVS

SEQ ID NO: 1292 - protein, 9 aa, Artificial Sequence
  hCD19 2-C6-LCDR3
QQSTEDPWT

SEQ ID NO: 1293 - DNA, 333 bp, Artificial Sequence
  hCD19 2-C6-L
gacatccagatgacccagtctccatcttctttgtctgcgtctgtaggggagagagtcaccatcacctgcaaggccagccaaagtgttgattatgatggttcgagttatttgaactggtaccaacagaaaccaggaaaggcacccaaactcctcatctatgatgcatccaatctagtttctggggtcccacccaggtttagtggcagtgggtctgggacagacttcaccctcaccatccattctctgcagccggaggatttcgcaacctattactgtcagcaaagtactgaggatccgtggacgttcggtcaagggaccaaggtggagatcaaa

SEQ ID NO: 1294 - protein, 250 aa, Artificial Sequence
  hCD19 2-C6-LH
DIQMTQSPSSLSASVGERVTITCKASQSVDYDGSSYLNWYQQKPGKAPKLLIYDASNLVSGVPPRFSGSGSGTDFTLTIHSLQPEDFATYYCQQSTEDPWTFGQGTKVEIKGGGGSGGGGSGGGGSQVQLVQSGAEVKKPGASVKISCKASGYAFTSYWMNWVRQAPGQGLEWIGQIWPGDGDTNYNGKFKGRVTLTADTSTSTAYMELSSLQSEDTAVYYCARRETTTVGRYYYAMDYWGQGTTVTVSS

SEQ ID NO: 1295 - DNA, 750 bp, Artificial Sequence
  hCD19 2-C6-LH
gacatccagatgacccagtctccatcttctttgtctgcgtctgtaggggagagagtcaccatcacctgcaaggccagccaaagtgttgattatgatggttcgagttatttgaactggtaccaacagaaaccaggaaaggcacccaaactcctcatctatgatgcatccaatctagtttctggggtcccacccaggtttagtggcagtgggtctgggacagacttcaccctcaccatccattctctgcagccggaggatttcgcaacctattactgtcagcaaagtactgaggatccgtggacgttcggtcaagggaccaaggtggagatcaaaggtggtggtggttctggcggcggcggctccggtggtggtggttctcaggtgcagctggtccagtctggggctgaggtgaagaagcctggggcctcagtgaagatttcctgcaaggcttctggctatgcattcactagctactggatgaactgggtgaggcaggcccctggacagggtcttgagtggattggacagatttggcctggagatggtgatactaactacaatggaaagttcaagggtagagtcactctgactgctgacacatccaccagcacagcctacatggaactcagcagcctacaatctgaggacactgcggtctattactgtgcaagacgggagactacgacggtaggccgttattactatgctatggactactggggccaagggaccacggtcaccgtctcctca

SEQ ID NO: 1296 - protein, 504 aa, Artificial Sequence
  hCD19 2-C6 LH x I2C HL
DIQMTQSPSSLSASVGERVTITCKASQSVDYDGSSYLNWYQQKPGKAPKLLIYDASNLVSGVPPRFSGSGSGTDFTLTIHSLQPEDFATYYCQQSTEDPWTFGQGTKVEIKGGGGSGGGGSGGGGSQVQLVQSGAEVKKPGASVKISCKASGYAFTSYWMNWVRQAPGQGLEWIGQIWPGDGDTNYNGKFKGRVTLTADTSTSTAYMELSSLQSEDTAVYYCARRETTTVGRYYYAMDYWGQGTTVTVSSGGGGSEVQLVESGGGLVQPGGSLKLSCAASGFTFNKYAMNWVRQAPGKGLEWVARIRSKYNNYATYYADSVKDRFTISRDDSKNTAYLQMNNLKTEDTAVYYCVRHGNFGNSYISYWAYWGQGTLVTVSSGGGGSGGGGSGGGGSQTVVTQEPSLTVSPGGTVTLTCGSSTGAVTSGNYPNWVQQKPGQAPRGLIGGTKFLAPGTPARFSGSLLGGKAALTLSGVQPEDEAEYYCVLWYSNRWVFGGGTKLTVL

SEQ ID NO: 1297 - DNA, 1512 bp, Artificial Sequence
  hCD19 2-C6 LH x I2C HL
gacatccagatgacccagtctccatcttctttgtctgcgtctgtaggggagagagtcaccatcacctgcaaggccagccaaagtgttgattatgatggttcgagttatttgaactggtaccaacagaaaccaggaaaggcacccaaactcctcatctatgatgcatccaatctagtttctggggtcccacccaggtttagtggcagtgggtctgggacagacttcaccctcaccatccattctctgcagccggaggatttcgcaacctattactgtcagcaaagtactgaggatccgtggacgttcggtcaagggaccaaggtggagatcaaaggtggtggtggttctggcggcggcggctccggtggtggtggttctcaggtgcagctggtccagtctggggctgaggtgaagaagcctggggcctcagtgaagatttcctgcaaggcttctggctatgcattcactagctactggatgaactgggtgaggcaggcccctggacagggtcttgagtggattggacagatttggcctggagatggtgatactaactacaatggaaagttcaagggtagagtcactctgactgctgacacatccaccagcacagcctacatggaactcagcagcctacaatctgaggacactgcggtctattactgtgcaagacgggagactacgacggtaggccgttattactatgctatggactactggggccaagggaccacggtcaccgtctcctccggaggtggtggatccgaggtgcagctggtcgagtctggaggaggattggtgcagcctggagggtcattgaaactctcatgtgcagcctctggattcaccttcaataagtacgccatgaactgggtccgccaggctccaggaaagggtttggaatgggttgctcgcataagaagtaaatataataattatgcaacatattatgccgattcagtgaaagacaggttcaccatctccagagatgattcaaaaaacactgcctatctacaaatgaacaacttgaaaactgaggacactgccgtgtactactgtgtgagacatgggaacttcggtaatagctacatatcctactgggcttactggggccaagggactctggtcaccgtctcctcaggtggtggtggttctggcggcggcggctccggtggtggtggttctcagactgttgtgactcaggaaccttcactcaccgtatcacctggtggaacagtcacactcacttgtggctcctcgactggggctgttacatctggcaactacccaaactgggtccaacaaaaaccaggtcaggcaccccgtggtctaataggtgggactaagttcctcgcccccggtactcctgccagattctcaggctccctgcttggaggcaaggctgccctcaccctctcaggggtacagccagaggatgaggcagaatattactgtgttctatggtacagcaaccgctgggtgttcggtggaggaaccaaactgactgtccta

SEQ ID NO: 1298 - protein, 124 aa, Artificial Sequence
  hCD19 4-C7-H
QVQLVQSGAEVVKPGASVKISCKASGYAFTSYWMNWVRQRPGQGLEWIGQIWPGDGDTNYNGKFKGRVTMTADESTSTAYMELSSLRSEDTAVYYCARRETTTVGRYYYAMDYWGQGTTVTVSS

SEQ ID NO: 1299 - protein, 5 aa, Artificial Sequence
  hCD19 4-C7-HCDR1
SYWMN

SEQ ID NO: 1300 - protein, 17 aa, Artificial Sequence
  hCD19 4-C7-HCDR2
QIWPGDGDTNYNGKFKG

SEQ ID NO: 1301 - protein, 15 aa, Artificial Sequence
  hCD19 4-C7-HCDR3
RETTTVGRYYYAMDY

SEQ ID NO: 1302 - DNA, 372 bp, Artificial Sequence
  hCD19 4-C7-H
caggtgcagctggtccagtctggggctgaggtggtgaagcctggggcctcagtgaagatttcctgcaaggcttctggctatgcattcactagctactggatgaactgggtgaggcagcgccctggacagggtcttgagtggattggacagatttggcctggagatggtgatactaactacaatggaaagttcaagggtagagtcactatgactgctgacgaatccaccagcacagcctacatggaactcagcagcctgcgatctgaggacactgcggtctattactgtgcaagacgggagactacgacggtaggccgttattactatgctatggactactggggccaagggaccacggtcaccgtctcctca

SEQ ID NO: 1303 - protein, 111 aa, Artificial Sequence
  hCD19 4-C7-L
DIQMTQSPSSLSASLGDRVTITCKASQSVDYDGTSYLNWYQQKPGQPPKLLIYDASNLVSGVPSRFSGSGSGTDFTLTISPLEQEDFATYYCQQSTEDPWTFGQGTKVEIK

SEQ ID NO: 1304 - protein, 15 aa, Artificial Sequence
  hCD19 4-C7-LCDR1
KASQSVDYDGSSYLN

SEQ ID NO: 1305 - protein, 7 aa, Artificial Sequence
  hCD19 4-C7-LCDR2
DASNLVS

SEQ ID NO: 1306 - protein, 9 aa, Artificial Sequence
  hCD19 4-C7-LCDR3
QQSTEDPWT

SEQ ID NO: 1307 - DNA, 333 bp, Artificial Sequence
  hCD19 4-C7-L
gacatccagatgacccagtctccatcttctttgtctgcgtctctaggggacagagtcaccatcacctgcaaggccagccaaagtgttgattatgatggtacgagttatttgaactggtaccaacagaaaccaggacagccacccaaactcctcatctatgatgcatccaatctagtttctggggtcccatccaggtttagtggcagtgggtctgggacagacttcaccctcaccatcagtcctctggagcaggaggatttcgcaacctattactgtcagcaaagtactgaggatccgtggacgttcggtcaagggaccaaggtggagatcaaa

SEQ ID NO: 1308 - protein, 250 aa, Artificial Sequence
  hCD19 4-C7-LH
DIQMTQSPSSLSASLGDRVTITCKASQSVDYDGTSYLNWYQQKPGQPPKLLIYDASNLVSGVPSRFSGSGSGTDFTLTISPLEQEDFATYYCQQSTEDPWTFGQGTKVEIKGGGGSGGGGSGGGGSQVQLVQSGAEVVKPGASVKISCKASGYAFTSYWMNWVRQRPGQGLEWIGQIWPGDGDTNYNGKFKGRVTMTADESTSTAYMELSSLRSEDTAVYYCARRETTTVGRYYYAMDYWGQGTTVTVSS

SEQ ID NO: 1309 - DNA, 750 bp, Artificial Sequence
  hCD19 4-C7-LH
gacatccagatgacccagtctccatcttctttgtctgcgtctctaggggacagagtcaccatcacctgcaaggccagccaaagtgttgattatgatggtacgagttatttgaactggtaccaacagaaaccaggacagccacccaaactcctcatctatgatgcatccaatctagtttctggggtcccatccaggtttagtggcagtgggtctgggacagacttcaccctcaccatcagtcctctggagcaggaggatttcgcaacctattactgtcagcaaagtactgaggatccgtggacgttcggtcaagggaccaaggtggagatcaaaggtggtggtggttctggcggcggcggctccggtggtggtggttctcaggtgcagctggtccagtctggggctgaggtggtgaagcctggggcctcagtgaagatttcctgcaaggcttctggctatgcattcactagctactggatgaactgggtgaggcagcgccctggacagggtcttgagtggattggacagatttggcctggagatggtgatactaactacaatggaaagttcaagggtagagtcactatgactgctgacgaatccaccagcacagcctacatggaactcagcagcctgcgatctgaggacactgcggtctattactgtgcaagacgggagactacgacggtaggccgttattactatgctatggactactggggccaagggaccacggtcaccgtctcctca

SEQ ID NO: 1310 - protein, 504 aa, Artificial Sequence
  hCD19 4-C7 LH x I2C HL
DIQMTQSPSSLSASLGDRVTITCKASQSVDYDGTSYLNWYQQKPGQPPKLLIYDASNLVSGVPSRFSGSGSGTDFTLTISPLEQEDFATYYCQQSTEDPWTFGQGTKVEIKGGGGSGGGGSGGGGSQVQLVQSGAEVVKPGASVKISCKASGYAFTSYWMNWVRQRPGQGLEWIGQIWPGDGDTNYNGKFKGRVTMTADESTSTAYMELSSLRSEDTAVYYCARRETTTVGRYYYAMDYWGQGTTVTVSSGGGGSEVQLVESGGGLVQPGGSLKLSCAASGFTFNKYAMNWVRQAPGKGLEWVARIRSKYNNYATYYADSVKDRFTISRDDSKNTAYLQMNNLKTEDTAVYYCVRHGNFGNSYISYWAYWGQGTLVTVSSGGGGSGGGGSGGGGSQTVVTQEPSLTVSPGGTVTLTCGSSTGAVTSGNYPNWVQQKPGQAPRGLIGGTKFLAPGTPARFSGSLLGGKAALTLSGVQPEDEAEYYCVLWYSNRWVFGGGTKLTVL

SEQ ID NO: 1311 - DNA, 1512 bp, Artificial Sequence
  hCD19 4-C7 LH x I2C HL
gacatccagatgacccagtctccatcttctttgtctgcgtctctaggggacagagtcaccatcacctgcaaggccagccaaagtgttgattatgatggtacgagttatttgaactggtaccaacagaaaccaggacagccacccaaactcctcatctatgatgcatccaatctagtttctggggtcccatccaggtttagtggcagtgggtctgggacagacttcaccctcaccatcagtcctctggagcaggaggatttcgcaacctattactgtcagcaaagtactgaggatccgtggacgttcggtcaagggaccaaggtggagatcaaaggtggtggtggttctggcggcggcggctccggtggtggtggttctcaggtgcagctggtccagtctggggctgaggtggtgaagcctggggcctcagtgaagatttcctgcaaggcttctggctatgcattcactagctactggatgaactgggtgaggcagcgccctggacagggtcttgagtggattggacagatttggcctggagatggtgatactaactacaatggaaagttcaagggtagagtcactatgactgctgacgaatccaccagcacagcctacatggaactcagcagcctgcgatctgaggacactgcggtctattactgtgcaagacgggagactacgacggtaggccgttattactatgctatggactactggggccaagggaccacggtcaccgtctcctccggaggtggtggatccgaggtgcagctggtcgagtctggaggaggattggtgcagcctggagggtcattgaaactctcatgtgcagcctctggattcaccttcaataagtacgccatgaactgggtccgccaggctccaggaaagggtttggaatgggttgctcgcataagaagtaaatataataattatgcaacatattatgccgattcagtgaaagacaggttcaccatctccagagatgattcaaaaaacactgcctatctacaaatgaacaacttgaaaactgaggacactgccgtgtactactgtgtgagacatgggaacttcggtaatagctacatatcctactgggcttactggggccaagggactctggtcaccgtctcctcaggtggtggtggttctggcggcggcggctccggtggtggtggttctcagactgttgtgactcaggaaccttcactcaccgtatcacctggtggaacagtcacactcacttgtggctcctcgactggggctgttacatctggcaactacccaaactgggtccaacaaaaaccaggtcaggcaccccgtggtctaataggtgggactaagttcctcgcccccggtactcctgccagattctcaggctccctgcttggaggcaaggctgccctcaccctctcaggggtacagccagaggatgaggcagaatattactgtgttctatggtacagcaaccgctgggtgttcggtggaggaaccaaactgactgtccta

SEQ ID NO: 1312 - protein, 124 aa, Artificial Sequence; identical to SEQ ID NO: 1298
  hCD19 2-D7-H

SEQ ID NO: 1313 - protein, 5 aa, Artificial Sequence
  hCD19 2-D7-HCDR1
SYWMN

SEQ ID NO: 1314 - protein, 17 aa, Artificial Sequence
  hCD19 2-D7-HCDR2
QIWPGDGDTNYNGKFKG

SEQ ID NO: 1315 - protein, 15 aa, Artificial Sequence
  hCD19 2-D7-HCDR3
RETTTVGRYYYAMDY

SEQ ID NO: 1316 - DNA, 372 bp, Artificial Sequence; identical to SEQ ID NO: 1302
  hCD19 2-D7-H

SEQ ID NO: 1317 - protein, 111 aa, Artificial Sequence; identical to SEQ ID NO: 1289
  hCD19 2-D7-L

SEQ ID NO: 1318 - protein, 15 aa, Artificial Sequence
  hCD19 2-D7-LCDR1
KASQSVDYDGSSYLN

SEQ ID NO: 1319 - protein, 7 aa, Artificial Sequence
  hCD19 2-D7-LCDR2
DASNLVS

SEQ ID NO: 1320 - protein, 9 aa, Artificial Sequence
  hCD19 2-D7-LCDR3
QQSTEDPWT

SEQ ID NO: 1321 - DNA, 333 bp, Artificial Sequence; identical to SEQ ID NO: 1293
  hCD19 2-D7-L

SEQ ID NO: 1322 - protein, 250 aa, Artificial Sequence
  hCD19 2-D7-LH
DIQMTQSPSSLSASVGERVTITCKASQSVDYDGSSYLNWYQQKPGKAPKLLIYDASNLVSGVPPRFSGSGSGTDFTLTIHSLQPEDFATYYCQQSTEDPWTFGQGTKVEIKGGGGSGGGGSGGGGSQVQLVQSGAEVVKPGASVKISCKASGYAFTSYWMNWVRQRPGQGLEWIGQIWPGDGDTNYNGKFKGRVTMTADESTSTAYMELSSLRSEDTAVYYCARRETTTVGRYYYAMDYWGQGTTVTVSS

SEQ ID NO: 1323 - DNA, 750 bp, Artificial Sequence
  hCD19 2-D7-LH
gacatccagatgacccagtctccatcttctttgtctgcgtctgtaggggagagagtcaccatcacctgcaaggccagccaaagtgttgattatgatggttcgagttatttgaactggtaccaacagaaaccaggaaaggcacccaaactcctcatctatgatgcatccaatctagtttctggggtcccacccaggtttagtggcagtgggtctgggacagacttcaccctcaccatccattctctgcagccggaggatttcgcaacctattactgtcagcaaagtactgaggatccgtggacgttcggtcaagggaccaaggtggagatcaaaggtggtggtggttctggcggcggcggctccggtggtggtggttctcaggtgcagctggtccagtctggggctgaggtggtgaagcctggggcctcagtgaagatttcctgcaaggcttctggctatgcattcactagctactggatgaactgggtgaggcagcgccctggacagggtcttgagtggattggacagatttggcctggagatggtgatactaactacaatggaaagttcaagggtagagtcactatgactgctgacgaatccaccagcacagcctacatggaactcagcagcctgcgatctgaggacactgcggtctattactgtgcaagacgggagactacgacggtaggccgttattactatgctatggactactggggccaagggaccacggtcaccgtctcctca

SEQ ID NO: 1324 - protein, 504 aa, Artificial Sequence
  hCD19 2-D7 LH x I2C HL
DIQMTQSPSSLSASVGERVTITCKASQSVDYDGSSYLNWYQQKPGKAPKLLIYDASNLVSGVPPRFSGSGSGTDFTLTIHSLQPEDFATYYCQQSTEDPWTFGQGTKVEIKGGGGSGGGGSGGGGSQVQLVQSGAEVVKPGASVKISCKASGYAFTSYWMNWVRQRPGQGLEWIGQIWPGDGDTNYNGKFKGRVTMTADESTSTAYMELSSLRSEDTAVYYCARRETTTVGRYYYAMDYWGQGTTVTVSSGGGGSEVQLVESGGGLVQPGGSLKLSCAASGFTFNKYAMNWVRQAPGKGLEWVARIRSKYNNYATYYADSVKDRFTISRDDSKNTAYLQMNNLKTEDTAVYYCVRHGNFGNSYISYWAYWGQGTLVTVSSGGGGSGGGGSGGGGSQTVVTQEPSLTVSPGGTVTLTCGSSTGAVTSGNYPNWVQQKPGQAPRGLIGGTKFLAPGTPARFSGSLLGGKAALTLSGVQPEDEAEYYCVLWYSNRWVFGGGTKLTVL

SEQ ID NO: 1325 - DNA, 1512 bp, Artificial Sequence
  hCD19 2-D7 LH x I2C HL
gacatccagatgacccagtctccatcttctttgtctgcgtctgtaggggagagagtcaccatcacctgcaaggccagccaaagtgttgattatgatggttcgagttatttgaactggtaccaacagaaaccaggaaaggcacccaaactcctcatctatgatgcatccaatctagtttctggggtcccacccaggtttagtggcagtgggtctgggacagacttcaccctcaccatccattctctgcagccggaggatttcgcaacctattactgtcagcaaagtactgaggatccgtggacgttcggtcaagggaccaaggtggagatcaaaggtggtggtggttctggcggcggcggctccggtggtggtggttctcaggtgcagctggtccagtctggggctgaggtggtgaagcctggggcctcagtgaagatttcctgcaaggcttctggctatgcattcactagctactggatgaactgggtgaggcagcgccctggacagggtcttgagtggattggacagatttggcctggagatggtgatactaactacaatggaaagttcaagggtagagtcactatgactgctgacgaatccaccagcacagcctacatggaactcagcagcctgcgatctgaggacactgcggtctattactgtgcaagacgggagactacgacggtaggccgttattactatgctatggactactggggccaagggaccacggtcaccgtctcctccggaggtggtggatccgaggtgcagctggtcgagtctggaggaggattggtgcagcctggagggtcattgaaactctcatgtgcagcctctggattcaccttcaataagtacgccatgaactgggtccgccaggctccaggaaagggtttggaatgggttgctcgcataagaagtaaatataataattatgcaacatattatgccgattcagtgaaagacaggttcaccatctccagagatgattcaaaaaacactgcctatctacaaatgaacaacttgaaaactgaggacactgccgtgtactactgtgtgagacatgggaacttcggtaatagctacatatcctactgggcttactggggccaagggactctggtcaccgtctcctcaggtggtggtggttctggcggcggcggctccggtggtggtggttctcagactgttgtgactcaggaaccttcactcaccgtatcacctggtggaacagtcacactcacttgtggctcctcgactggggctgttacatctggcaactacccaaactgggtccaacaaaaaccaggtcaggcaccccgtggtctaataggtgggactaagttcctcgcccccggtactcctgccagattctcaggctccctgcttggaggcaaggctgccctcaccctctcaggggtacagccagaggatgaggcagaatattactgtgttctatggtacagcaaccgctgggtgttcggtggaggaaccaaactgactgtccta

SEQ ID NO: 1326 - protein, 124 aa, Artificial Sequence; identical to SEQ ID NO: 1298
  hCD19 2-D4-H

SEQ ID NO: 1327 - protein, 5 aa, Artificial Sequence
  hCD19 2-D4-HCDR1
SYWMN

SEQ ID NO: 1328 - protein, 17 aa, Artificial Sequence
  hCD19 2-D4-HCDR2
QIWPGDGDTNYNGKFKG

SEQ ID NO: 1329 - protein, 15 aa, Artificial Sequence
  hCD19 2-D4-HCDR3
RETTTVGRYYYAMDY

SEQ ID NO: 1330 - DNA, 372 bp, Artificial Sequence; identical to SEQ ID NO: 1302
  hCD19 2-D4-H

SEQ ID NO: 1331 - protein, 111 aa, Artificial Sequence
  hCD19 2-D4-L
DIQMTQSPASLSVSVGERVTITCKASQSVDYDGTSYLNWYQQKPGQAPKLLIYDASNLVSGVPSRFSGSGSGTDFTLTISSLQPEDFATYYCQQSTEDPWTFGQGTKVEIK

SEQ ID NO: 1332 - protein, 15 aa, Artificial Sequence
  hCD19 2-D4-LCDR1
KASQSVDYDGSSYLN

SEQ ID NO: 1333 - protein, 7 aa, Artificial Sequence
  hCD19 2-D4-LCDR2
DASNLVS

SEQ ID NO: 1334 - protein, 9 aa, Artificial Sequence
  hCD19 2-D4-LCDR3
QQSTEDPWT

SEQ ID NO: 1335 - DNA, 333 bp, Artificial Sequence
  hCD19 2-D4-L
gacatccagatgacccagtctccagcttctttgtctgtgtctgtaggggagagagtcaccatcacctgcaaggccagccaaagtgttgattatgatggtaccagttatttgaactggtaccaacagaaaccaggacaggcacccaaactcctcatctatgatgcatccaatctagtttctggggtcccatccaggtttagtggcagtgggtctgggacagacttcaccctcaccatcagttctctgcagccggaggatttcgcaacctattactgtcagcaaagtactgaggatccgtggacgttcggtcaagggaccaaggtggagatcaaa

SEQ ID NO: 1336 - protein, 250 aa, Artificial Sequence
  hCD19 2-D4-LH
DIQMTQSPASLSVSVGERVTITCKASQSVDYDGTSYLNWYQQKPGQAPKLLIYDASNLVSGVPSRFSGSGSGTDFTLTISSLQPEDFATYYCQQSTEDPWTFGQGTKVEIKGGGGSGGGGSGGGGSQVQLVQSGAEVVKPGASVKISCKASGYAFTSYWMNWVRQRPGQGLEWIGQIWPGDGDTNYNGKFKGRVTMTADESTSTAYMELSSLRSEDTAVYYCARRETTTVGRYYYAMDYWGQGTTVTVSS

SEQ ID NO: 1337 - DNA, 750 bp, Artificial Sequence
  hCD19 2-D4-LH
gacatccagatgacccagtctccagcttctttgtctgtgtctgtaggggagagagtcaccatcacctgcaaggccagccaaagtgttgattatgatggtaccagttatttgaactggtaccaacagaaaccaggacaggcacccaaactcctcatctatgatgcatccaatctagtttctggggtcccatccaggtttagtggcagtgggtctgggacagacttcaccctcaccatcagttctctgcagccggaggatttcgcaacctattactgtcagcaaagtactgaggatccgtggacgttcggtcaagggaccaaggtggagatcaaaggtggtggtggttctggcggcggcggctccggtggtggtggttctcaggtgcagctggtccagtctggggctgaggtggtgaagcctggggcctcagtgaagatttcctgcaaggcttctggctatgcattcactagctactggatgaactgggtgaggcagcgccctggacagggtcttgagtggattggacagatttggcctggagatggtgatactaactacaatggaaagttcaagggtagagtcactatgactgctgacgaatccaccagcacagcctacatggaactcagcagcctgcgatctgaggacactgcggtctattactgtgcaagacgggagactacgacggtaggccgttattactatgctatggactactggggccaagggaccacggtcaccgtctcctca

SEQ ID NO: 1338 - protein, 504 aa, Artificial Sequence
  hCD19 2-D4 LH x I2C HL
DIQMTQSPASLSVSVGERVTITCKASQSVDYDGTSYLNWYQQKPGQAPKLLIYDASNLVSGVPSRFSGSGSGTDFTLTISSLQPEDFATYYCQQSTEDPWTFGQGTKVEIKGGGGSGGGGSGGGGSQVQLVQSGAEVVKPGASVKISCKASGYAFTSYWMNWVRQRPGQGLEWIGQIWPGDGDTNYNGKFKGRVTMTADESTSTAYMELSSLRSEDTAVYYCARRETTTVGRYYYAMDYWGQGTTVTVSSGGGGSEVQLVESGGGLVQPGGSLKLSCAASGFTFNKYAMNWVRQAPGKGLEWVARIRSKYNNYATYYADSVKDRFTISRDDSKNTAYLQMNNLKTEDTAVYYCVRHGNFGNSYISYWAYWGQGTLVTVSSGGGGSGGGGSGGGGSQTVVTQEPSLTVSPGGTVTLTCGSSTGAVTSGNYPNWVQQKPGQAPRGLIGGTKFLAPGTPARFSGSLLGGKAALTLSGVQPEDEAEYYCVLWYSNRWVFGGGTKLTVL

SEQ ID NO: 1339 - DNA, 1512 bp, Artificial Sequence
  hCD19 2-D4 LH x I2C HL
gacatccagatgacccagtctccagcttctttgtctgtgtctgtaggggagagagtcaccatcacctgcaaggccagccaaagtgttgattatgatggtaccagttatttgaactggtaccaacagaaaccaggacaggcacccaaactcctcatctatgatgcatccaatctagtttctggggtcccatccaggtttagtggcagtgggtctgggacagacttcaccctcaccatcagttctctgcagccggaggatttcgcaacctattactgtcagcaaagtactgaggatccgtggacgttcggtcaagggaccaaggtggagatcaaaggtggtggtggttctggcggcggcggctccggtggtggtggttctcaggtgcagctggtccagtctggggctgaggtggtgaagcctggggcctcagtgaagatttcctgcaaggcttctggctatgcattcactagctactggatgaactgggtgaggcagcgccctggacagggtcttgagtggattggacagatttggcctggagatggtgatactaactacaatggaaagttcaagggtagagtcactatgactgctgacgaatccaccagcacagcctacatggaactcagcagcctgcgatctgaggacactgcggtctattactgtgcaagacgggagactacgacggtaggccgttattactatgctatggactactggggccaagggaccacggtcaccgtctcctccggaggtggtggatccgaggtgcagctggtcgagtctggaggaggattggtgcagcctggagggtcattgaaactctcatgtgcagcctctggattcaccttcaataagtacgccatgaactgggtccgccaggctccaggaaagggtttggaatgggttgctcgcataagaagtaaatataataattatgcaacatattatgccgattcagtgaaagacaggttcaccatctccagagatgattcaaaaaacactgcctatctacaaatgaacaacttgaaaactgaggacactgccgtgtactactgtgtgagacatgggaacttcggtaatagctacatatcctactgggcttactggggccaagggactctggtcaccgtctcctcaggtggtggtggttctggcggcggcggctccggtggtggtggttctcagactgttgtgactcaggaaccttcactcaccgtatcacctggtggaacagtcacactcacttgtggctcctcgactggggctgttacatctggcaactacccaaactgggtccaacaaaaaccaggtcaggcaccccgtggtctaataggtgggactaagttcctcgcccccggtactcctgccagattctcaggctccctgcttggaggcaaggctgccctcaccctctcaggggtacagccagaggatgaggcagaatattactgtgttctatggtacagcaaccgctgggtgttcggtggaggaaccaaactgactgtccta

SEQ ID NO: 1340 - protein, 124 aa, Artificial Sequence; identical to SEQ ID NO: 1298
  hCD19 5-G3-H

SEQ ID NO: 1341 - protein, 5 aa, Artificial Sequence
  hCD19 5-G3-HCDR1
SYWMN

SEQ ID NO: 1342 - protein, 17 aa, Artificial Sequence
  hCD19 5-G3-HCDR2
QIWPGDGDTNYNGKFKG

SEQ ID NO: 1343 - protein, 15 aa, Artificial Sequence
  hCD19 5-G3-HCDR3
RETTTVGRYYYAMDY

SEQ ID NO: 1344 - DNA, 372 bp, Artificial Sequence; identical to SEQ ID NO: 1302
  hCD19 5-G3-H

SEQ ID NO: 1345 - protein, 111 aa, Artificial Sequence
  hCD19 5-G3-L
DIQMTQSPSSLSASVGDRVTITCKASQSVDYDGLSYLNWYQQKPGQAPKLLIYDASNLVSGIPSRFSGSGSGTDFTLTISSLEPEDFATYYCQQSTEDPWTFGQGTKVEIK

SEQ ID NO: 1346 - protein, 15 aa, Artificial Sequence
  hCD19 5-G3-LCDR1
KASQSVDYDGSSYLN

SEQ ID NO: 1347 - protein, 7 aa, Artificial Sequence
  hCD19 5-G3-LCDR2
DASNLVS

SEQ ID NO: 1348 - protein, 9 aa, Artificial Sequence
  hCD19 5-G3-LCDR3
QQSTEDPWT

SEQ ID NO: 1349 - DNA, 333 bp, Artificial Sequence
  hCD19 5-G3-L
gacatccagatgacccagtctccatcttctttgtctgcgtctgtaggggacagagtcaccatcacctgcaaggccagccaaagtgttgattatgatggtctcagttatttgaactggtaccaacagaaaccaggacaggcacccaaactcctcatctatgatgcatccaatctagtttctgggatcccatccaggtttagtggcagtgggtctgggacagacttcaccctcaccatcagttctctggagccggaggatttcgcaacctattactgtcagcaaagtactgaggatccgtggacgttcggtcaagggaccaaggtggagatcaaa

SEQ ID NO: 1350 - protein, 250 aa, Artificial Sequence
  hCD19 5-G3-LH
DIQMTQSPSSLSASVGDRVTITCKASQSVDYDGLSYLNWYQQKPGQAPKLLIYDASNLVSGIPSRFSGSGSGTDFTLTISSLEPEDFATYYCQQSTEDPWTFGQGTKVEIKGGGGSGGGGSGGGGSQVQLVQSGAEVVKPGASVKISCKASGYAFTSYWMNWVRQRPGQGLEWIGQIWPGDGDTNYNGKFKGRVTMTADESTSTAYMELSSLRSEDTAVYYCARRETTTVGRYYYAMDYWGQGTTVTVSS

SEQ ID NO: 1351 - DNA, 750 bp, Artificial Sequence
  hCD19 5-G3-LH
gacatccagatgacccagtctccatcttctttgtctgcgtctgtaggggacagagtcaccatcacctgcaaggccagccaaagtgttgattatgatggtctcagttatttgaactggtaccaacagaaaccaggacaggcacccaaactcctcatctatgatgcatccaatctagtttctgggatcccatccaggtttagtggcagtgggtctgggacagacttcaccctcaccatcagttctctggagccggaggatttcgcaacctattactgtcagcaaagtactgaggatccgtggacgttcggtcaagggaccaaggtggagatcaaaggtggtggtggttctggcggcggcggctccggtggtggtggttctcaggtgcagctggtccagtctggggctgaggtggtgaagcctggggcctcagtgaagatttcctgcaaggcttctggctatgcattcactagctactggatgaactgggtgaggcagcgccctggacagggtcttgagtggattggacagatttggcctggagatggtgatactaactacaatggaaagttcaagggtagagtcactatgactgctgacgaatccaccagcacagcctacatggaactcagcagcctgcgatctgaggacactgcggtctattactgtgcaagacgggagactacgacggtaggccgttattactatgctatggactactggggccaagggaccacggtcaccgtctcctca

SEQ ID NO: 1352 - protein, 504 aa, Artificial Sequence
  hCD19 5-G3 LH x I2C HL
DIQMTQSPSSLSASVGDRVTITCKASQSVDYDGLSYLNWYQQKPGQAPKLLIYDASNLVSGIPSRFSGSGSGTDFTLTISSLEPEDFATYYCQQSTEDPWTFGQGTKVEIKGGGGSGGGGSGGGGSQVQLVQSGAEVVKPGASVKISCKASGYAFTSYWMNWVRQRPGQGLEWIGQIWPGDGDTNYNGKFKGRVTMTADESTSTAYMELSSLRSEDTAVYYCARRETTTVGRYYYAMDYWGQGTTVTVSSGGGGSEVQLVESGGGLVQPGGSLKLSCAASGFTFNKYAMNWVRQAPGKGLEWVARIRSKYNNYATYYADSVKDRFTISRDDSKNTAYLQMNNLKTEDTAVYYCVRHGNFGNSYISYWAYWGQGTLVTVSSGGGGSGGGGSGGGGSQTVVTQEPSLTVSPGGTVTLTCGSSTGAVTSGNYPNWVQQKPGQAPRGLIGGTKFLAPGTPARFSGSLLGGKAALTLSGVQPEDEAEYYCVLWYSNRWVFGGGTKLTVL

SEQ ID NO: 1353 - DNA, 1512 bp, Artificial Sequence
  hCD19 5-G3 LH x I2C HL
gacatccagatgacccagtctccatcttctttgtctgcgtctgtaggggacagagtcaccatcacctgcaaggccagccaaagtgttgattatgatggtctcagttatttgaactggtaccaacagaaaccaggacaggcacccaaactcctcatctatgatgcatccaatctagtttctgggatcccatccaggtttagtggcagtgggtctgggacagacttcaccctcaccatcagttctctggagccggaggatttcgcaacctattactgtcagcaaagtactgaggatccgtggacgttcggtcaagggaccaaggtggagatcaaaggtggtggtggttctggcggcggcggctccggtggtggtggttctcaggtgcagctggtccagtctggggctgaggtggtgaagcctggggcctcagtgaagatttcctgcaaggcttctggctatgcattcactagctactggatgaactgggtgaggcagcgccctggacagggtcttgagtggattggacagatttggcctggagatggtgatactaactacaatggaaagttcaagggtagagtcactatgactgctgacgaatccaccagcacagcctacatggaactcagcagcctgcgatctgaggacactgcggtctattactgtgcaagacgggagactacgacggtaggccgttattactatgctatggactactggggccaagggaccacggtcaccgtctcctccggaggtggtggatccgaggtgcagctggtcgagtctggaggaggattggtgcagcctggagggtcattgaaactctcatgtgcagcctctggattcaccttcaataagtacgccatgaactgggtccgccaggctccaggaaagggtttggaatgggttgctcgcataagaagtaaatataataattatgcaacatattatgccgattcagtgaaagacaggttcaccatctccagagatgattcaaaaaacactgcctatctacaaatgaacaacttgaaaactgaggacactgccgtgtactactgtgtgagacatgggaacttcggtaatagctacatatcctactgggcttactggggccaagggactctggtcaccgtctcctcaggtggtggtggttctggcggcggcggctccggtggtggtggttctcagactgttgtgactcaggaaccttcactcaccgtatcacctggtggaacagtcacactcacttgtggctcctcgactggggctgttacatctggcaactacccaaactgggtccaacaaaaaccaggtcaggcaccccgtggtctaataggtgggactaagttcctcgcccccggtactcctgccagattctcaggctccctgcttggaggcaaggctgccctcaccctctcaggggtacagccagaggatgaggcagaatattactgtgttctatggtacagcaaccgctgggtgttcggtggaggaaccaaactgactgtccta

SEQ ID NO: 1354 - protein, 124 aa, Artificial Sequence; identical to SEQ ID NO: 1298
  hCD19 4-E10-H

SEQ ID NO: 1355 - protein, 5 aa, Artificial Sequence
  hCD19 4-E10-HCDR1
SYWMN

SEQ ID NO: 1356 - protein, 17 aa, Artificial Sequence
  hCD19 4-E10-HCDR2
QIWPGDGDTNYNGKFKG

SEQ ID NO: 1357 - protein, 15 aa, Artificial Sequence
  hCD19 4-E10-HCDR3
RETTTVGRYYYAMDY

SEQ ID NO: 1358 - DNA, 372 bp, Artificial Sequence; identical to SEQ ID NO: 1302
  hCD19 4-E10-H

SEQ ID NO: 1359 - protein, 111 aa, Artificial Sequence
  hCD19 4-E10-L
DIQMTQSPSSLSASVGDRVTITCKASQSVDYDGTSYLNWYQQKPGQAPKLLIYDASNLVSGVPSRFSGSGSGTDFTLNISSVQPEDVATYYCQQSTEDPWTFGQGTKVEIK

SEQ ID NO: 1360 - protein, 16 aa, Artificial Sequence
  hCD19 4-E10-LCDR1
RSSKSLLHSNGNTYLY

SEQ ID NO: 1361 - protein, 7 aa, Artificial Sequence
  hCD19 4-E10-LCDR2
RMSNLAS

SEQ ID NO: 1362 - protein, 9 aa, Artificial Sequence
  hCD19 4-E10-LCDR3
LQHLEYPYT

SEQ ID NO: 1363 - DNA, 333 bp, Artificial Sequence
  hCD19 4-E10-L
gacatccagatgacccagtctccatcttctttgtctgcgtctgtaggggacagagtcaccatcacctgcaaggccagccaaagtgttgattatgatggtacgagttatttgaactggtaccaacagaaaccaggacaggcacccaaactcctcatctatgatgcatccaatctagtttctggggtcccatccaggtttagtggcagtgggtctgggacagacttcaccctcaacatcagttctgtgcagccggaggatgtcgcaacctattactgtcagcaaagtactgaggatccgtggacgttcggtcaagggaccaaggtggagatcaaa

SEQ ID NO: 1364 - protein, 250 aa, Artificial Sequence
  hCD19 4-E10-LH
DIQMTQSPSSLSASVGDRVTITCKASQSVDYDGTSYLNWYQQKPGQAPKLLIYDASNLVSGVPSRFSGSGSGTDFTLNISSVQPEDVATYYCQQSTEDPWTFGQGTKVEIKGGGGSGGGGSGGGGSQVQLVQSGAEVVKPGASVKISCKASGYAFTSYWMNWVRQRPGQGLEWIGQIWPGDGDTNYNGKFKGRVTMTADESTSTAYMELSSLRSEDTAVYYCARRETTTVGRYYYAMDYWGQGTTVTVSS

SEQ ID NO: 1365 - DNA, 750 bp, Artificial Sequence
  hCD19 4-E10-LH
gacatccagatgacccagtctccatcttctttgtctgcgtctgtaggggacagagtcaccatcacctgcaaggccagccaaagtgttgattatgatggtacgagttatttgaactggtaccaacagaaaccaggacaggcacccaaactcctcatctatgatgcatccaatctagtttctggggtcccatccaggtttagtggcagtgggtctgggacagacttcaccctcaacatcagttctgtgcagccggaggatgtcgcaacctattactgtcagcaaagtactgaggatccgtggacgttcggtcaagggaccaaggtggagatcaaaggtggtggtggttctggcggcggcggctccggtggtggtggttctcaggtgcagctggtccagtctggggctgaggtggtgaagcctggggcctcagtgaagatttcctgcaaggcttctggctatgcattcactagctactggatgaactgggtgaggcagcgccctggacagggtcttgagtggattggacagatttggcctggagatggtgatactaactacaatggaaagttcaagggtagagtcactatgactgctgacgaatccaccagcacagcctacatggaactcagcagcctgcgatctgaggacactgcggtctattactgtgcaagacgggagactacgacggtaggccgttattactatgctatggactactggggccaagggaccacggtcaccgtctcctca

SEQ ID NO: 1366 - protein, 504 aa, Artificial Sequence
  hCD19 4-E10 LH x I2C HL
DIQMTQSPSSLSASVGDRVTITCKASQSVDYDGTSYLNWYQQKPGQAPKLLIYDASNLVSGVPSRFSGSGSGTDFTLNISSVQPEDVATYYCQQSTEDPWTFGQGTKVEIKGGGGSGGGGSGGGGSQVQLVQSGAEVVKPGASVKISCKASGYAFTSYWMNWVRQRPGQGLEWIGQIWPGDGDTNYNGKFKGRVTMTADESTSTAYMELSSLRSEDTAVYYCARRETTTVGRYYYAMDYWGQGTTVTVSSGGGGSEVQLVESGGGLVQPGGSLKLSCAASGFTFNKYAMNWVRQAPGKGLEWVARIRSKYNNYATYYADSVKDRFTISRDDSKNTAYLQMNNLKTEDTAVYYCVRHGNFGNSYISYWAYWGQGTLVTVSSGGGGSGGGGSGGGGSQTVVTQEPSLTVSPGGTVTLTCGSSTGAVTSGNYPNWVQQKPGQAPRGLIGGTKFLAPGTPARFSGSLLGGKAALTLSGVQPEDEAEYYCVLWYSNRWVFGGGTKLTVL

SEQ ID NO: 1367 - DNA, 1512 bp, Artificial Sequence
  hCD19 4-E10 LH x I2C HL
gacatccagatgacccagtctccatcttctttgtctgcgtctgtaggggacagagtcaccatcacctgcaaggccagccaaagtgttgattatgatggtacgagttatttgaactggtaccaacagaaaccaggacaggcacccaaactcctcatctatgatgcatccaatctagtttctggggtcccatccaggtttagtggcagtgggtctgggacagacttcaccctcaacatcagttctgtgcagccggaggatgtcgcaacctattactgtcagcaaagtactgaggatccgtggacgttcggtcaagggaccaaggtggagatcaaaggtggtggtggttctggcggcggcggctccggtggtggtggttctcaggtgcagctggtccagtctggggctgaggtggtgaagcctggggcctcagtgaagatttcctgcaaggcttctggctatgcattcactagctactggatgaactgggtgaggcagcgccctggacagggtcttgagtggattggacagatttggcctggagatggtgatactaactacaatggaaagttcaagggtagagtcactatgactgctgacgaatccaccagcacagcctacatggaactcagcagcctgcgatctgaggacactgcggtctattactgtgcaagacgggagactacgacggtaggccgttattactatgctatggactactggggccaagggaccacggtcaccgtctcctccggaggtggtggatccgaggtgcagctggtcgagtctggaggaggattggtgcagcctggagggtcattgaaactctcatgtgcagcctctggattcaccttcaataagtacgccatgaactgggtccgccaggctccaggaaagggtttggaatgggttgctcgcataagaagtaaatataataattatgcaacatattatgccgattcagtgaaagacaggttcaccatctccagagatgattcaaaaaacactgcctatctacaaatgaacaacttgaaaactgaggacactgccgtgtactactgtgtgagacatgggaacttcggtaatagctacatatcctactgggcttactggggccaagggactctggtcaccgtctcctcaggtggtggtggttctggcggcggcggctccggtggtggtggttctcagactgttgtgactcaggaaccttcactcaccgtatcacctggtggaacagtcacactcacttgtggctcctcgactggggctgttacatctggcaactacccaaactgggtccaacaaaaaccaggtcaggcaccccgtggtctaataggtgggactaagttcctcgcccccggtactcctgccagattctcaggctccctgcttggaggcaaggctgccctcaccctctcaggggtacagccagaggatgaggcagaatattactgtgttctatggtacagcaaccgctgggtgttcggtggaggaaccaaactgactgtccta

SEQ ID NO: 1368 - protein, 124 aa, Artificial Sequence; identical to SEQ ID NO: 1298
  hCD19 4-E3-H

SEQ ID NO: 1369 - protein, 5 aa, Artificial Sequence
  hCD19 4-E3-HCDR1
SYWMN

SEQ ID NO: 1370 - protein, 17 aa, Artificial Sequence
  hCD19 4-E3-HCDR2
QIWPGDGDTNYNGKFKG

SEQ ID NO: 1371 - protein, 15 aa, Artificial Sequence
  hCD19 4-E3-HCDR3
RETTTVGRYYYAMDY

SEQ ID NO: 1372 - DNA, 372 bp, Artificial Sequence; identical to SEQ ID NO: 1302
  hCD19 4-E3-H

SEQ ID NO: 1373 - protein, 111 aa, Artificial Sequence
  hCD19 4-E3-L
DIQMTQSPSSLAASVGERVTITCKASQSVDYDGTSYLNWYQQKPGKAPKLLIYDASNLVSGVPSRFSGSGSGTDFTLTINSLEKEDFATYYCQQSTEDPWTFGQGTKVEIK

SEQ ID NO: 1374 - protein, 16 aa, Artificial Sequence
  hCD19 4-E3-LCDR1
RSSKSLLHSNGNTYLY

SEQ ID NO: 1375 - protein, 7 aa, Artificial Sequence
  hCD19 4-E3-LCDR2
RMSNLAS

SEQ ID NO: 1376 - protein, 9 aa, Artificial Sequence
  hCD19 4-E3-LCDR3
LQHLEYPYT

SEQ ID NO: 1377 - DNA, 333 bp, Artificial Sequence
  hCD19 4-E3-L
gacatccagatgacccagtctccatcttctttggctgcgtctgtaggggagagagtcaccatcacctgcaaggccagccaaagtgttgattatgatggtacgagttatttgaactggtaccaacagaaaccaggaaaggcacccaaactcctcatctatgatgcatccaatctagtttctggggtcccatccaggtttagtggcagtgggtctgggacagacttcaccctcaccatcaattctctggagaaggaggatttcgcaacctattactgtcagcaaagtactgaggatccgtggacgttcggtcaagggaccaaggtggagatcaaa

SEQ ID NO: 1378 - protein, 250 aa, Artificial Sequence
  hCD19 4-E3-LH
DIQMTQSPSSLAASVGERVTITCKASQSVDYDGTSYLNWYQQKPGKAPKLLIYDASNLVSGVPSRFSGSGSGTDFTLTINSLEKEDFATYYCQQSTEDPWTFGQGTKVEIKGGGGSGGGGSGGGGSQVQLVQSGAEVVKPGASVKISCKASGYAFTSYWMNWVRQRPGQGLEWIGQIWPGDGDTNYNGKFKGRVTMTADESTSTAYMELSSLRSEDTAVYYCARRETTTVGRYYYAMDYWGQGTTVTVSS

SEQ ID NO: 1379 - DNA, 750 bp, Artificial Sequence
  hCD19 4-E3-LH
gacatccagatgacccagtctccatcttctttggctgcgtctgtaggggagagagtcaccatcacctgcaaggccagccaaagtgttgattatgatggtacgagttatttgaactggtaccaacagaaaccaggaaaggcacccaaactcctcatctatgatgcatccaatctagtttctggggtcccatccaggtttagtggcagtgggtctgggacagacttcaccctcaccatcaattctctggagaaggaggatttcgcaacctattactgtcagcaaagtactgaggatccgtggacgttcggtcaagggaccaaggtggagatcaaaggtggtggtggttctggcggcggcggctccggtggtggtggttctcaggtgcagctggtccagtctggggctgaggtggtgaagcctggggcctcagtgaagatttcctgcaaggcttctggctatgcattcactagctactggatgaactgggtgaggcagcgccctggacagggtcttgagtggattggacagatttggcctggagatggtgatactaactacaatggaaagttcaagggtagagtcactatgactgctgacgaatccaccagcacagcctacatggaactcagcagcctgcgatctgaggacactgcggtctattactgtgcaagacgggagactacgacggtaggccgttattactatgctatggactactggggccaagggaccacggtcaccgtctcctca

SEQ ID NO: 1380 - protein, 504 aa, Artificial Sequence
  hCD19 4-E3 LH  X I2C HL
DIQMTQSPSSLAASVGERVTITCKASQSVDYDGTSYLNWYQQKPGKAPKLLIYDASNLVSGVPSRFSGSGSGTDFTLTINSLEKEDFATYYCQQSTEDPWTFGQGTKVEIKGGGGSGGGGSGGGGSQVQLVQSGAEVVKPGASVKISCKASGYAFTSYWMNWVRQRPGQGLEWIGQIWPGDGDTNYNGKFKGRVTMTADESTSTAYMELSSLRSEDTAVYYCARRETTTVGRYYYAMDYWGQGTTVTVSSGGGGSEVQLVESGGGLVQPGGSLKLSCAASGFTFNKYAMNWVRQAPGKGLEWVARIRSKYNNYATYYADSVKDRFTISRDDSKNTAYLQMNNLKTEDTAVYYCVRHGNFGNSYISYWAYWGQGTLVTVSSGGGGSGGGGSGGGGSQTVVTQEPSLTVSPGGTVTLTCGSSTGAVTSGNYPNWVQQKPGQAPRGLIGGTKFLAPGTPARFSGSLLGGKAALTLSGVQPEDEAEYYCVLWYSNRWVFGGGTKLTVL

SEQ ID NO: 1381 - DNA, 1512 bp, Artificial Sequence
  hCD19 4-E3 LH  X I2C HL
gacatccagatgacccagtctccatcttctttggctgcgtctgtaggggagagagtcaccatcacctgcaaggccagccaaagtgttgattatgatggtacgagttatttgaactggtaccaacagaaaccaggaaaggcacccaaactcctcatctatgatgcatccaatctagtttctggggtcccatccaggtttagtggcagtgggtctgggacagacttcaccctcaccatcaattctctggagaaggaggatttcgcaacctattactgtcagcaaagtactgaggatccgtggacgttcggtcaagggaccaaggtggagatcaaaggtggtggtggttctggcggcggcggctccggtggtggtggttctcaggtgcagctggtccagtctggggctgaggtggtgaagcctggggcctcagtgaagatttcctgcaaggcttctggctatgcattcactagctactggatgaactgggtgaggcagcgccctggacagggtcttgagtggattggacagatttggcctggagatggtgatactaactacaatggaaagttcaagggtagagtcactatgactgctgacgaatccaccagcacagcctacatggaactcagcagcctgcgatctgaggacactgcggtctattactgtgcaagacgggagactacgacggtaggccgttattactatgctatggactactggggccaagggaccacggtcaccgtctcctccggaggtggtggatccgaggtgcagctggtcgagtctggaggaggattggtgcagcctggagggtcattgaaactctcatgtgcagcctctggattcaccttcaataagtacgccatgaactgggtccgccaggctccaggaaagggtttggaatgggttgctcgcataagaagtaaatataataattatgcaacatattatgccgattcagtgaaagacaggttcaccatctccagagatgattcaaaaaacactgcctatctacaaatgaacaacttgaaaactgaggacactgccgtgtactactgtgtgagacatgggaacttcggtaatagctacatatcctactgggcttactggggccaagggactctggtcaccgtctcctcaggtggtggtggttctggcggcggcggctccggtggtggtggttctcagactgttgtgactcaggaaccttcactcaccgtatcacctggtggaacagtcacactcacttgtggctcctcgactggggctgttacatctggcaactacccaaactgggtccaacaaaaaccaggtcaggcaccccgtggtctaataggtgggactaagttcctcgcccccggtactcctgccagattctcaggctccctgcttggaggcaaggctgccctcaccctctcaggggtacagccagaggatgaggcagaatattactgtgttctatggtacagcaaccgctgggtgttcggtggaggaaccaaactgactgtccta

SEQ ID NO: 1382 - protein, 124 aa, Artificial Sequence; identical to SEQ ID NO: 1298
  hCD19 3-H7 -H

SEQ ID NO: 1383 - protein, 5 aa, Artificial Sequence
  hCD19 3-H7 -HCDR1
SYWMN

SEQ ID NO: 1384 - protein, 17 aa, Artificial Sequence
  hCD19 3-H7 -HCDR2
QIWPGDGDTNYNGKFKG

SEQ ID NO: 1385 - protein, 15 aa, Artificial Sequence
  hCD19 3-H7 -HCDR3
RETTTVGRYYYAMDY

SEQ ID NO: 1386 - DNA, 372 bp, Artificial Sequence; identical to SEQ ID NO: 1302
  hCD19 3-H7 -H

SEQ ID NO: 1387 - protein, 111 aa, Artificial Sequence
  hCD19 3-H7 -L
DIQMTQSPSSLSASVGDRVTITCKASQSVDYDGTSYLNWYQQKPGKAPKLLIYDASNLVSGVPSRFSGSGSGTDFTLNISSLQPEDVATYYCQQSTEDPWTFGQGTKVEIK

SEQ ID NO: 1388 - protein, 16 aa, Artificial Sequence
  hCD19 3-H7 -LCDR1
RSSKSLLHSNGNTYLY

SEQ ID NO: 1389 - protein, 7 aa, Artificial Sequence
  hCD19 3-H7 -LCDR2
RMSNLAS

SEQ ID NO: 1390 - protein, 9 aa, Artificial Sequence
  hCD19 3-H7 -LCDR3
LQHLEYPYT

SEQ ID NO: 1391 - DNA, 333 bp, Artificial Sequence
  hCD19 3-H7 -L
gacatccagatgacccagtctccatcttctttgtctgcgtctgtaggggacagagtcaccatcacctgcaaggccagccaaagtgttgattatgatggtacgagttatttgaactggtaccaacagaaaccaggaaaggcacccaaactcctcatctatgatgcatccaatctagtttctggggtcccatccaggtttagtggcagtgggtctgggacagacttcaccctcaacatcagttctctgcagccggaggatgtcgcaacctattactgtcagcaaagtactgaggatccgtggacgttcggtcaagggaccaaggtggagatcaaa

SEQ ID NO: 1392 - protein, 250 aa, Artificial Sequence
  hCD19 3-H7 -LH
DIQMTQSPSSLSASVGDRVTITCKASQSVDYDGTSYLNWYQQKPGKAPKLLIYDASNLVSGVPSRFSGSGSGTDFTLNISSLQPEDVATYYCQQSTEDPWTFGQGTKVEIKGGGGSGGGGSGGGGSQVQLVQSGAEVVKPGASVKISCKASGYAFTSYWMNWVRQRPGQGLEWIGQIWPGDGDTNYNGKFKGRVTMTADESTSTAYMELSSLRSEDTAVYYCARRETTTVGRYYYAMDYWGQGTTVTVSS

SEQ ID NO: 1393 - DNA, 750 bp, Artificial Sequence
  hCD19 3-H7 -LH
gacatccagatgacccagtctccatcttctttgtctgcgtctgtaggggacagagtcaccatcacctgcaaggccagccaaagtgttgattatgatggtacgagttatttgaactggtaccaacagaaaccaggaaaggcacccaaactcctcatctatgatgcatccaatctagtttctggggtcccatccaggtttagtggcagtgggtctgggacagacttcaccctcaacatcagttctctgcagccggaggatgtcgcaacctattactgtcagcaaagtactgaggatccgtggacgttcggtcaagggaccaaggtggagatcaaaggtggtggtggttctggcggcggcggctccggtggtggtggttctcaggtgcagctggtccagtctggggctgaggtggtgaagcctggggcctcagtgaagatttcctgcaaggcttctggctatgcattcactagctactggatgaactgggtgaggcagcgccctggacagggtcttgagtggattggacagatttggcctggagatggtgatactaactacaatggaaagttcaagggtagagtcactatgactgctgacgaatccaccagcacagcctacatggaactcagcagcctgcgatctgaggacactgcggtctattactgtgcaagacgggagactacgacggtaggccgttattactatgctatggactactggggccaagggaccacggtcaccgtctcctca

SEQ ID NO: 1394 - protein, 504 aa, Artificial Sequence
  hCD19 3-H7 LH  X I2C HL
DIQMTQSPSSLSASVGDRVTITCKASQSVDYDGTSYLNWYQQKPGKAPKLLIYDASNLVSGVPSRFSGSGSGTDFTLNISSLQPEDVATYYCQQSTEDPWTFGQGTKVEIKGGGGSGGGGSGGGGSQVQLVQSGAEVVKPGASVKISCKASGYAFTSYWMNWVRQRPGQGLEWIGQIWPGDGDTNYNGKFKGRVTMTADESTSTAYMELSSLRSEDTAVYYCARRETTTVGRYYYAMDYWGQGTTVTVSSGGGGSEVQLVESGGGLVQPGGSLKLSCAASGFTFNKYAMNWVRQAPGKGLEWVARIRSKYNNYATYYADSVKDRFTISRDDSKNTAYLQMNNLKTEDTAVYYCVRHGNFGNSYISYWAYWGQGTLVTVSSGGGGSGGGGSGGGGSQTVVTQEPSLTVSPGGTVTLTCGSSTGAVTSGNYPNWVQQKPGQAPRGLIGGTKFLAPGTPARFSGSLLGGKAALTLSGVQPEDEAEYYCVLWYSNRWVFGGGTKLTVL

SEQ ID NO: 1395 - DNA, 1512 bp, Artificial Sequence
  hCD19 3-H7 LH  X I2C HL
gacatccagatgacccagtctccatcttctttgtctgcgtctgtaggggacagagtcaccatcacctgcaaggccagccaaagtgttgattatgatggtacgagttatttgaactggtaccaacagaaaccaggaaaggcacccaaactcctcatctatgatgcatccaatctagtttctggggtcccatccaggtttagtggcagtgggtctgggacagacttcaccctcaacatcagttctctgcagccggaggatgtcgcaacctattactgtcagcaaagtactgaggatccgtggacgttcggtcaagggaccaaggtggagatcaaaggtggtggtggttctggcggcggcggctccggtggtggtggttctcaggtgcagctggtccagtctggggctgaggtggtgaagcctggggcctcagtgaagatttcctgcaaggcttctggctatgcattcactagctactggatgaactgggtgaggcagcgccctggacagggtcttgagtggattggacagatttggcctggagatggtgatactaactacaatggaaagttcaagggtagagtcactatgactgctgacgaatccaccagcacagcctacatggaactcagcagcctgcgatctgaggacactgcggtctattactgtgcaagacgggagactacgacggtaggccgttattactatgctatggactactggggccaagggaccacggtcaccgtctcctccggaggtggtggatccgaggtgcagctggtcgagtctggaggaggattggtgcagcctggagggtcattgaaactctcatgtgcagcctctggattcaccttcaataagtacgccatgaactgggtccgccaggctccaggaaagggtttggaatgggttgctcgcataagaagtaaatataataattatgcaacatattatgccgattcagtgaaagacaggttcaccatctccagagatgattcaaaaaacactgcctatctacaaatgaacaacttgaaaactgaggacactgccgtgtactactgtgtgagacatgggaacttcggtaatagctacatatcctactgggcttactggggccaagggactctggtcaccgtctcctcaggtggtggtggttctggcggcggcggctccggtggtggtggttctcagactgttgtgactcaggaaccttcactcaccgtatcacctggtggaacagtcacactcacttgtggctcctcgactggggctgttacatctggcaactacccaaactgggtccaacaaaaaccaggtcaggcaccccgtggtctaataggtgggactaagttcctcgcccccggtactcctgccagattctcaggctccctgcttggaggcaaggctgccctcaccctctcaggggtacagccagaggatgaggcagaatattactgtgttctatggtacagcaaccgctgggtgttcggtggaggaaccaaactgactgtccta

SEQ ID NO: 1396 - DNA, 2952 bp, Artificial Sequence
  cMET-1
atgggatggagctgtatcatcctcttcttggtagcaacagctacaggtgtacactccgagtgtaaagaggcactagcaaagtccgagatgaatgtgaatatgaagtatcagcttcccaacttcaccgcggaaacacccatccagaatgtcattctacatgagcatcacattttccttggtgccactaactacatttatgttttaaatgaggaagaccttcagaaggttgctgagtacaagactgggcctgtgctggaacacccagattgtttcccatgtcaggactgcagcagcaaagccaatttatcaggaggtgtttggaaagataacatcaacatggctctagttgtggacacctactatgatgatcaactcattagctgtggcagcgtcaacagagggacctgccagcgacatgtctttccccacaatcatactgctgacatacagtcggaggttcactgcatattctccccacagatagaagagcccagccagtgtcctgactgtgtggtgagcgccctgggagccaaagtcctttcatctgtaaaggaccggttcatcaacttctttgtaggcaataccataaattcttcttatttcccagatcatccattgcattcgatatcagtgagaaggctaaaggaaacgaaagatggttttatgtttttgacggaccagtcctacattgatgttttacctgagttcagagattcttaccccattaagtatgtccatgcctttgaaagcaacaattttatttacttcttgacggtccaaagggaaactctagatgctcagacttttcacacaagaataatcaggttctgttccataaactctggattgcattcctacatggaaatgcctctggagtgtattctcacagaaaagagaaaaaagagatccacaaagaaggaagtgtttaatatacttcaggctgcgtatgtcagcaagcctggggcccagcttgctagacaaataggagccagcctgaatgatgacattcttttcggggtgttcgcacaaagcaagccagattctgccgaaccaatggatcgatctgccatgtgtgcattccctatcaaatatgtcaacgacttcttcaacaagatcgtcaacaaaaacaatgtgagatgtctccagcatttttacggacccaatcatgagcactgctttaataggacacttctgagaaattcatcaggctgtgaagcgcgccgtgatgaatatcgaacagagtttaccacagctttgcagcgcgttgacttattcatgggtcaattcagcgaagtcctcttaacatctatatccaccttcattaaaggagacctcaccatagctaatcttgggacatcagagggtcgcttcatgcaggttgtggtttctcgatcaggaccatcaacccctcatgtgaattttctcctggactcccatccagtgtctccagaagtgattgtggagcatacattaaaccaaaatggctacacactggttatcactgggaagaagatcacgaagatcccattgaatggcttgggctgcagacatttccagtcctgcagtcaatgcctctctgccccaccctttgttcagtgtggctggtgccacgacaaatgtgtgcgatcggaggaatgcctgagcgggacatggactcaacagatctgtctgcctgcaatctacaaggttttcccaaatagtgcaccccttgaaggagggacaaggctgaccatatgtggctgggactttggatttcggaggaataataaatttgatttaaagaaaactagagttctccttggaaatgagagctgcaccttgactttaagtgagagcacgatgaatacattgaaatgcacagttggtcctgccatgaataagcatttcaatatgtccataattatttcaaatggccacgggacaacacaatacagtacattctcctatgtggatcctgtaataacaagtatttcgccgaaatacggtcctatggctggtggcactttacttactttaactggaaattacctaaacagtgggaatagcagacacatttcaattggtggaaaaacatgtactttaaaaagtgtgtcaaacagtattcttgaatgttataccccagcccaaaccatttcaactgagtttgctgttaaattgaaaattgacttagccaaccgagagacaagcatcttcagttaccgtgaagatcccattgtctatgaaattcatccaaccaaatcttttattagtggtgggagcacaataacaggtgttgggaaaaacctgaactcagttagtgtcccgagaatggtcataaatgtgcatgaagcaggaaggaactttacagtggcatgtcaacatcgctctaattcagagataatctgttgtaccactccttccctgcaacagctgaatctgcaactccccctgaaaaccaaagcctttttcatgttagatgggatcctttccaaatactttgatctcatttatgtacataatcctgtgtttaagccttttgaaaagccagtgatgatctcaatgggcaatgaaaatgtactggaaattaagggaaatgatattgaccctgaagcagttaaaggtgaagtgttaaaagttggaaataagagctgtgagaatatacacttacattctgaagccgttttatgcacggtccccaatgacctgctgaaattgaacagcgagctaaatatagagtggaagcaagcaatttcttcaaccgtccttggaaaagtaatagttcaaccagatcagaatttcacatccggaggtggtggatccggggctggtgttattgctgttattgtggttgtggtgatagcaattgttgctggaattgttgtgctggttatttccagaaagaagagaatggcaaagtatgagaaggctgagataaaggagatgggtgagatgcatagggaactcaatgcataa

SEQ ID NO: 1397 - protein, 983 aa, Artificial Sequence
  cMET-2
MGWSCIILFLVATATGVHSECKEALAKSEMNVNMKYQLPNFTAETPIQNVILHEHHIFLGATNYIYVLNEEDLQKVAEYKTGPVLEHPDCFPCQDCSSKANLSGGVWKDNINMALVVDTYYDDQLISCGSVNRGTCQRHVFPHNHTADIQSEVHCIFSPQIEEPSQCPDCVVSALGAKVLSSVKDRFINFFVGNTINSSYFPDHPLHSISVRRLKETKDGFMFLTDQSYIDVLPEFRDSYPIKYVHAFESNNFIYFLTVQRETLDAQTFHTRIIRFCSINSGLHSYMEMPLECILTEKRKKRSTKKEVFNILQAAYVSKPGAQLARQIGASLNDDILFGVFAQSKPDSAEPMDRSAMCAFPIKYVNDFFNKIVNKNNVRCLQHFYGPNHEHCFNRTLLRNSSGCEARRDEYRTEFTTALQRVDLFMGQFSEVLLTSISTFIKGDLTIANLGTSEGRFMQVVVSRSGPSTPHVNFLLDSHPVSPEVIVEHTLNQNGYTLVITGKKITKIPLNGLGCRHFQSCSQCLSAPPFVQCGWCHDKCVRSEECLSGTWTQQICLPAIYKVFPNSAPLEGGTRLTICGWDFGFRRNNKFDLKKTRVLLGNESCTLTLSESTMNTLKCTVGPAMNKHFNMSIIISNGHGTTQYSTFSYVDPVITSISPKYGPMAGGTLLTLTGNYLNSGNSRHISIGGKTCTLKSVSNSILECYTPAQTISTEFAVKLKIDLANRETSIFSYREDPIVYEIHPTKSFISGGSTITGVGKNLNSVSVPRMVINVHEAGRNFTVACQHRSNSEIICCTTPSLQQLNLQLPLKTKAFFMLDGILSKYFDLIYVHNPVFKPFEKPVMISMGNENVLEIKGNDIDPEAVKGEVLKVGNKSCENIHLHSEAVLCTVPNDLLKLNSELNIEWKQAISSTVLGKVIVQPDQNFTSGGGGSGAGVIAVIVVVVIAIVAGIVVLVISRKKRMAKYEKAEIKEMGEMHRELNA

SEQ ID NO: 1398 - DNA, 2952 bp, Artificial Sequence
  cMET-3
atgggatggagctgtatcatcctcttcttggtagcaacagctacaggtgtacactccgagtgtaaagaggcactagcaaagtccgagatgaatgtgaatatgaagtatcagcttcccaacttcaccgcggaaacagccatccagaatgtcattctacatgagcatcacattttcctcggtgccaccaactacatttatgttttaaatgaggaagaccttcagaaggttgctgagtacaagaccgggcctgtgctggaacacccagattgtttcccgtgtcaggactgcagcagcaaagccaatttatcaggaggcgtttggaaagataacatcaacatggctctggttgtggacacctactatgatgatcaactcattagctgtggcagcgtcaacagagggacctgccagcgacatgtctttccccataatcatactgctgacatacagtcggaggttcactgcatattctccccacagatagaagagcccaaccagtgccctgactgtgtggtgagcgccctgggagccaaagtcctttcatctgtaaaggaccggttcatcaacttctttgtaggcaataccataaattcttcttatttcccacatcatccgttgcattcgatatcagtgagaaggctaaaggaaacgaaagatggttttatgtttttgacagaccagtcctacattgatgttttacctgagttcagagattcttaccccattaagtacatccacgcttttgaaagcaacaattttatttacttcttgacggtccaaagggaaactctaaatgctcagacttttcacacaagaataatcaggttctgttccttaaactctggattgcactcctacatggaaatgcctctagagtgtattctcacagaaaagagaaaaaagagatccacaaagaaggaagtgtttaatatccttcaggctgcatatgtcagcaagcccggggcccagcttgctagacaaataggagccagcctgaatgatgacattctctttggggtgttcgcacaaagcaagccagattctgccgaaccaatggatcgatctgcaatgtgtgcatttcctatcaaatatgtcaacgacttcttcaacaagatcgtcaacaaaaacaatgtgagatgtctccagcatttttatggacccaatcatgagcactgttttaataggacacttctgagaaattcatcaggctgtgaagcgcgccgtgatgaatatcgagcagagtttaccacagctttgcagcgggttgacttattcatgggtcaattcagcgaagtcctcttaacatctatatccaccttcgtgaaaggagacctcaccatcgctaatcttgggacatcagagggtcgcttcatgcaggttgtggtttctcgatcaggaccatcaacccctcatgtgaattttctcctggactctcacccggtgtctccagaagtgattgtggagcatccattaaaccagaatggctacacactggttgtcacggggaagaagatcaccaagatcccattgaatggcttgggctgcagacatttccagtcctgcagtcagtgcctctctgccccaccctttgtgcagtgtggctggtgccacgacaaatgtgtgcgatcggaggaatgccccagtgggacatggactcaacagatctgtctgcctgcaatctacaaggttttcccaactagtgcaccccttgaaggagggacaaggctgaccatatgtggctgggactttggatttcggaggaataataaatttgatttaaagaaaactagagttctccttggaaatgagagctgcaccttgactttaagtgagagcacgatgaatacattgaaatgcacagttggtcctgccatgaataaacatttcaatatgtccataattatttcaaatggccacgggacaacacaatacagtacattttcctatgtggatcctataataacaagtatttcgccaaaatatggccctatggctggtggcactttacttactttaactggaaattacctaaacagtggcaattctagacacatttcaattggtggaaaaacatgtactttaaaaagtgtgtcaaacagtattctcgaatgttataccccagcccaaaccatttcaactgagtttgctgttaaattgaaaattgacttagccaaccgagagacaagcatcttcagttaccgggaagaccccattgtctatgaaattcatccaaccaaatcttttattagtggtgggagcacaataacaggtgttgggaaaaacctgcattcagttagtgtcccgaggatggtcataaatgtgcatgaagcaggaaggaactttacagtggcatgtcagcatcgctctaattcagagataatctgctgtaccactccttccctgcaacagctgaatctgcaactccccctgaaaaccaaagcctttttcatgttagatgggatcctttccaaatactttgatctcatttatgtacataatcctgtgtttaagccttttgaaaagccagtaatgatctcaatgggcaatgaaaatgtactggaaattaagggaaatgatattgaccctgaagcagttaaaggtgaagtgttaaaagttggaaataagagctgtgagaatatacacttacattctgaagccgttttatgcacggtccccaatgacctgctgaaattgaacagcgagctaaatatagagtggaagcaagcaatttcttcaaccgtccttggaaaagtaatagttcaaccagatcagaatttcacctccggaggtggtggatccggggctggtgttattgctgttattgtggttgtggtgatagcaattgttgctggaattgttgtgctggttatttccagaaagaagagaatggcaaagtatgagaaggctgagataaaggagatgggtgagatgcatagggaactcaatgcataa

SEQ ID NO: 1399 - protein, 983 aa, Artificial Sequence
  cMET-4
MGWSCIILFLVATATGVHSECKEALAKSEMNVNMKYQLPNFTAETAIQNVILHEHHIFLGATNYIYVLNEEDLQKVAEYKTGPVLEHPDCFPCQDCSSKANLSGGVWKDNINMALVVDTYYDDQLISCGSVNRGTCQRHVFPHNHTADIQSEVHCIFSPQIEEPNQCPDCVVSALGAKVLSSVKDRFINFFVGNTINSSYFPHHPLHSISVRRLKETKDGFMFLTDQSYIDVLPEFRDSYPIKYIHAFESNNFIYFLTVQRETLNAQTFHTRIIRFCSLNSGLHSYMEMPLECILTEKRKKRSTKKEVFNILQAAYVSKPGAQLARQIGASLNDDILFGVFAQSKPDSAEPMDRSAMCAFPIKYVNDFFNKIVNKNNVRCLQHFYGPNHEHCFNRTLLRNSSGCEARRDEYRAEFTTALQRVDLFMGQFSEVLLTSISTFVKGDLTIANLGTSEGRFMQVVVSRSGPSTPHVNFLLDSHPVSPEVIVEHPLNQNGYTLVVTGKKITKIPLNGLGCRHFQSCSQCLSAPPFVQCGWCHDKCVRSEECPSGTWTQQICLPAIYKVFPTSAPLEGGTRLTICGWDFGFRRNNKFDLKKTRVLLGNESCTLTLSESTMNTLKCTVGPAMNKHFNMSIIISNGHGTTQYSTFSYVDPIITSISPKYGPMAGGTLLTLTGNYLNSGNSRHISIGGKTCTLKSVSNSILECYTPAQTISTEFAVKLKIDLANRETSIFSYREDPIVYEIHPTKSFISGGSTITGVGKNLHSVSVPRMVINVHEAGRNFTVACQHRSNSEIICCTTPSLQQLNLQLPLKTKAFFMLDGILSKYFDLIYVHNPVFKPFEKPVMISMGNENVLEIKGNDIDPEAVKGEVLKVGNKSCENIHLHSEAVLCTVPNDLLKLNSELNIEWKQAISSTVLGKVIVQPDQNFTSGGGGSGAGVIAVIVVVVIAIVAGIVVLVISRKKRMAKYEKAEIKEMGEMHRELNA

SEQ ID NO: 1400 - protein, 119 aa, Artificial Sequence
  ME86H11-H
QVQLVQSGAEVKRPGASVKVSCRASGYTFTSYWLHWVRQGPGQRLEWIGMIDPSNSDTRFNPNFKDRATFTVDTSASTAYMELSSLTSEDTAVYYCATYGSYVSPLDYWGQGTSVTVSS

SEQ ID NO: 1401 - protein, 5 aa, Artificial Sequence
  ME86H11-HCDR1
SYWLH

SEQ ID NO: 1402 - protein, 17 aa, Artificial Sequence
  ME86H11-HCDR2
MIDPSNSDTRFNPNFKD

SEQ ID NO: 1403 - protein, 10 aa, Artificial Sequence
  ME86H11-HCDR3
YGSYVSPLDY

SEQ ID NO: 1404 - DNA, 357 bp, Artificial Sequence
  ME86H11-H
caggtgcagctggtccagtctggggctgaagtgaagaggcctggggcttcagtgaaagtgtcctgcagggcttcgggctataccttcaccagctactggttgcactgggttagacaggggcctggacaaaggcttgagtggataggcatgattgatccttccaatagtgacactaggtttaatccgaacttcaaggacagggccacattcactgtagacacatctgccagcacagcctacatggagctcagcagcctgacatctgaggacactgcagtctattactgtgccacatatggtagctacgtttcccctctggactactggggtcaaggaacctcggtcaccgtctcctca

SEQ ID NO: 1405 - protein, 113 aa, Artificial Sequence
  ME86H11-L
DIVMTQTPFSLPVTLGETVSISCKSSQSLLYTSSQKNYLAWYLQKPGQSPQLLIYWASTRESGVPDRFSGSGSGTDFTLKISRVEAEDVGVYYCQQYYAYPWTFGGGTKLEIK

SEQ ID NO: 1406 - protein, 17 aa, Artificial Sequence
  ME86H11-LCDR1
KSSQSLLYTSSQKNYLA

SEQ ID NO: 1407 - protein, 7 aa, Artificial Sequence
  ME86H11-LCDR2
WASTRES

SEQ ID NO: 1408 - protein, 9 aa, Artificial Sequence
  ME86H11-LCDR3
QQYYAYPWT

SEQ ID NO: 1409 - DNA, 339 bp, Artificial Sequence
  ME86H11-L
gacatcgtgatgacccagactccattctccctacctgtgacacttggagagacggtttctatcagctgcaagtccagtcagtcccttttatatactagcagtcagaagaactacttggcctggtacctgcagaaaccaggtcagtctcctcaactgctgatttactgggcatccactagggaatctggggtccctgatcgcttctcaggcagtggatctgggacagatttcactctcaaaatctccagagtggaggctgaggacgtgggagtttattactgtcagcaatattatgcctatccgtggacgttcggtggaggcacaaagttggagatcaaa

SEQ ID NO: 1410 - protein, 247 aa, Artificial Sequence
  ME86H11-HL
QVQLVQSGAEVKRPGASVKVSCRASGYTFTSYWLHWVRQGPGQRLEWIGMIDPSNSDTRFNPNFKDRATFTVDTSASTAYMELSSLTSEDTAVYYCATYGSYVSPLDYWGQGTSVTVSSGGGGSGGGGSGGGGSDIVMTQTPFSLPVTLGETVSISCKSSQSLLYTSSQKNYLAWYLQKPGQSPQLLIYWASTRESGVPDRFSGSGSGTDFTLKISRVEAEDVGVYYCQQYYAYPWTFGGGTKLEIK

SEQ ID NO: 1411 - DNA, 741 bp, Artificial Sequence
  ME86H11-HL
caggtgcagctggtccagtctggggctgaagtgaagaggcctggggcttcagtgaaagtgtcctgcagggcttcgggctataccttcaccagctactggttgcactgggttagacaggggcctggacaaaggcttgagtggataggcatgattgatccttccaatagtgacactaggtttaatccgaacttcaaggacagggccacattcactgtagacacatctgccagcacagcctacatggagctcagcagcctgacatctgaggacactgcagtctattactgtgccacatatggtagctacgtttcccctctggactactggggtcaaggaacctcggtcaccgtctcctcaggtggtggtggttctggcggcggcggctccggtggtggtggttctgacatcgtgatgacccagactccattctccctacctgtgacacttggagagacggtttctatcagctgcaagtccagtcagtcccttttatatactagcagtcagaagaactacttggcctggtacctgcagaaaccaggtcagtctcctcaactgctgatttactgggcatccactagggaatctggggtccctgatcgcttctcaggcagtggatctgggacagatttcactctcaaaatctccagagtggaggctgaggacgtgggagtttattactgtcagcaatattatgcctatccgtggacgttcggtggaggcacaaagttggagatcaaa

SEQ ID NO: 1412 - protein, 502 aa, Artificial Sequence
  ME86H11 HL x I2C HL
QVQLVQSGAEVKRPGASVKVSCRASGYTFTSYWLHWVRQGPGQRLEWIGMIDPSNSDTRFNPNFKDRATFTVDTSASTAYMELSSLTSEDTAVYYCATYGSYVSPLDYWGQGTSVTVSSGGGGSGGGGSGGGGSDIVMTQTPFSLPVTLGETVSISCKSSQSLLYTSSQKNYLAWYLQKPGQSPQLLIYWASTRESGVPDRFSGSGSGTDFTLKISRVEAEDVGVYYCQQYYAYPWTFGGGTKLEIKSGGGGSEVQLVESGGGLVQPGGSLKLSCAASGFTFNKYAMNWVRQAPGKGLEWVARIRSKYNNYATYYADSVKDRFTISRDDSKNTAYLQMNNLKTEDTAVYYCVRHGNFGNSYISYWAYWGQGTLVTVSSGGGGSGGGGSGGGGSQTVVTQEPSLTVSPGGTVTLTCGSSTGAVTSGNYPNWVQQKPGQAPRGLIGGTKFLAPGTPARFSGSLLGGKAALTLSGVQPEDEAEYYCVLWYSNRWVFGGGTKLTVL

SEQ ID NO: 1413 - DNA, 1506 bp, Artificial Sequence
  ME86H11 HL x I2C HL
caggtgcagctggtccagtctggggctgaagtgaagaggcctggggcttcagtgaaagtgtcctgcagggcttcgggctataccttcaccagctactggttgcactgggttagacaggggcctggacaaaggcttgagtggataggcatgattgatccttccaatagtgacactaggtttaatccgaacttcaaggacagggccacattcactgtagacacatctgccagcacagcctacatggagctcagcagcctgacatctgaggacactgcagtctattactgtgccacatatggtagctacgtttcccctctggactactggggtcaaggaacctcggtcaccgtctcctcaggtggtggtggttctggcggcggcggctccggtggtggtggttctgacatcgtgatgacccagactccattctccctacctgtgacacttggagagacggtttctatcagctgcaagtccagtcagtcccttttatatactagcagtcagaagaactacttggcctggtacctgcagaaaccaggtcagtctcctcaactgctgatttactgggcatccactagggaatctggggtccctgatcgcttctcaggcagtggatctgggacagatttcactctcaaaatctccagagtggaggctgaggacgtgggagtttattactgtcagcaatattatgcctatccgtggacgttcggtggaggcacaaagttggagatcaaatccggaggtggtggatccgaggtgcagctggtcgagtctggaggaggattggtgcagcctggagggtcattgaaactctcatgtgcagcctctggattcaccttcaataagtacgccatgaactgggtccgccaggctccaggaaagggtttggaatgggttgctcgcataagaagtaaatataataattatgcaacatattatgccgattcagtgaaagacaggttcaccatctccagagatgattcaaaaaacactgcctatctacaaatgaacaacttgaaaactgaggacactgccgtgtactactgtgtgagacatgggaacttcggtaatagctacatatcctactgggcttactggggccaagggactctggtcaccgtctcctcaggtggtggtggttctggcggcggcggctccggtggtggtggttctcagactgttgtgactcaggaaccttcactcaccgtatcacctggtggaacagtcacactcacttgtggctcctcgactggggctgttacatctggcaactacccaaactgggtccaacaaaaaccaggtcaggcaccccgtggtctaataggtgggactaagttcctcgcccccggtactcctgccagattctcaggctccctgcttggaggcaaggctgccctcaccctctcaggggtacagccagaggatgaggcagaatattactgtgttctatggtacagcaaccgctgggtgttcggtggaggaaccaaactgactgtccta

SEQ ID NO: 1414 - protein, 119 aa, Artificial Sequence
  ME62A12-H
QVQLVQSGAEVVKPGASVKVSCKASGYTFTSYWLHWVRQTPGQGLEWIGMIDPSNSDTRFNPNFKDKVTFTVDTSASTAYMELSSLRSEDTAVYYCATYGSYVSPLDYWGQGTSVTVSS

SEQ ID NO: 1415 - protein, 5 aa, Artificial Sequence
  ME62A12-HCDR1
SYWLH

SEQ ID NO: 1416 - protein, 17 aa, Artificial Sequence
  ME62A12-HCDR2
MIDPSNSDTRFNPNFKD

SEQ ID NO: 1417 - protein, 10 aa, Artificial Sequence
  ME62A12-HCDR3
YGSYVSPLDY

SEQ ID NO: 1418 - DNA, 357 bp, Artificial Sequence
  ME62A12-H
caggtgcagctggtccagtctggggctgaagtggtgaagcctggggcttcagtgaaagtgtcctgcaaggcttcgggctataccttcaccagctactggttgcactgggttagacagacgcctggacaagggcttgagtggataggcatgattgatccttccaatagtgacactaggtttaatccgaacttcaaggacaaggtcacattcactgtagacacatctgccagcacagcctacatggaactcagcagcctgagatctgaggacactgcagtctattactgtgccacatatggtagctacgtttcccctctggactactggggtcaaggaacctcggtcaccgtctcctca

SEQ ID NO: 1419 - protein, 113 aa, Artificial Sequence
  ME62A12-L
DIVMTQTPLSLPVTLGEKVSVSCKSSQSLLYTSSQKNYLAWYQQKPGQSPKLLIYWASTRESGVPDRFSGSGSGTDFTLTISRVEAEDLGVYYCQQYYAYPWTFGGGTKLEIK

SEQ ID NO: 1420 - protein, 17 aa, Artificial Sequence
  ME62A12-LCDR1
KSSQSLLYTSSQKNYLA

SEQ ID NO: 1421 - protein, 7 aa, Artificial Sequence
  ME62A12-LCDR2
WASTRES

SEQ ID NO: 1422 - protein, 9 aa, Artificial Sequence
  ME62A12-LCDR3
QQYYAYPWT

SEQ ID NO: 1423 - DNA, 339 bp, Artificial Sequence
  ME62A12-L
gacatcgtgatgacccagactccactctccctacctgtgacacttggagagaaggtttctgtcagctgcaagtccagtcagtcccttttatatactagcagtcagaagaactacttggcctggtaccagcagaaaccaggtcagtctcctaaactgctgatttactgggcatccactagggaatctggggtccctgatcgcttctcaggcagtggatctgggacagatttcactctcacaatctccagagtggaggctgaggacctgggagtttattactgtcagcaatattatgcctatccgtggacgttcggtggaggcacaaagttggagatcaaa

SEQ ID NO: 1424 - protein, 247 aa, Artificial Sequence
  ME62A12-HL
QVQLVQSGAEVVKPGASVKVSCKASGYTFTSYWLHWVRQTPGQGLEWIGMIDPSNSDTRFNPNFKDKVTFTVDTSASTAYMELSSLRSEDTAVYYCATYGSYVSPLDYWGQGTSVTVSSGGGGSGGGGSGGGGSDIVMTQTPLSLPVTLGEKVSVSCKSSQSLLYTSSQKNYLAWYQQKPGQSPKLLIYWASTRESGVPDRFSGSGSGTDFTLTISRVEAEDLGVYYCQQYYAYPWTFGGGTKLEIK

SEQ ID NO: 1425 - DNA, 741 bp, Artificial Sequence
  ME62A12-HL
caggtgcagctggtccagtctggggctgaagtggtgaagcctggggcttcagtgaaagtgtcctgcaaggcttcgggctataccttcaccagctactggttgcactgggttagacagacgcctggacaagggcttgagtggataggcatgattgatccttccaatagtgacactaggtttaatccgaacttcaaggacaaggtcacattcactgtagacacatctgccagcacagcctacatggaactcagcagcctgagatctgaggacactgcagtctattactgtgccacatatggtagctacgtttcccctctggactactggggtcaaggaacctcggtcaccgtctcctcaggtggtggtggttctggcggcggcggctccggtggtggtggttctgacatcgtgatgacccagactccactctccctacctgtgacacttggagagaaggtttctgtcagctgcaagtccagtcagtcccttttatatactagcagtcagaagaactacttggcctggtaccagcagaaaccaggtcagtctcctaaactgctgatttactgggcatccactagggaatctggggtccctgatcgcttctcaggcagtggatctgggacagatttcactctcacaatctccagagtggaggctgaggacctgggagtttattactgtcagcaatattatgcctatccgtggacgttcggtggaggcacaaagttggagatcaaa

SEQ ID NO: 1426 - protein, 502 aa, Artificial Sequence
  ME62A12 HL x I2C HL
QVQLVQSGAEVVKPGASVKVSCKASGYTFTSYWLHWVRQTPGQGLEWIGMIDPSNSDTRFNPNFKDKVTFTVDTSASTAYMELSSLRSEDTAVYYCATYGSYVSPLDYWGQGTSVTVSSGGGGSGGGGSGGGGSDIVMTQTPLSLPVTLGEKVSVSCKSSQSLLYTSSQKNYLAWYQQKPGQSPKLLIYWASTRESGVPDRFSGSGSGTDFTLTISRVEAEDLGVYYCQQYYAYPWTFGGGTKLEIKSGGGGSEVQLVESGGGLVQPGGSLKLSCAASGFTFNKYAMNWVRQAPGKGLEWVARIRSKYNNYATYYADSVKDRFTISRDDSKNTAYLQMNNLKTEDTAVYYCVRHGNFGNSYISYWAYWGQGTLVTVSSGGGGSGGGGSGGGGSQTVVTQEPSLTVSPGGTVTLTCGSSTGAVTSGNYPNWVQQKPGQAPRGLIGGTKFLAPGTPARFSGSLLGGKAALTLSGVQPEDEAEYYCVLWYSNRWVFGGGTKLTVL

SEQ ID NO: 1427 - DNA, 1506 bp, Artificial Sequence
  ME62A12 HL x I2C HL
caggtgcagctggtccagtctggggctgaagtggtgaagcctggggcttcagtgaaagtgtcctgcaaggcttcgggctataccttcaccagctactggttgcactgggttagacagacgcctggacaagggcttgagtggataggcatgattgatccttccaatagtgacactaggtttaatccgaacttcaaggacaaggtcacattcactgtagacacatctgccagcacagcctacatggaactcagcagcctgagatctgaggacactgcagtctattactgtgccacatatggtagctacgtttcccctctggactactggggtcaaggaacctcggtcaccgtctcctcaggtggtggtggttctggcggcggcggctccggtggtggtggttctgacatcgtgatgacccagactccactctccctacctgtgacacttggagagaaggtttctgtcagctgcaagtccagtcagtcccttttatatactagcagtcagaagaactacttggcctggtaccagcagaaaccaggtcagtctcctaaactgctgatttactgggcatccactagggaatctggggtccctgatcgcttctcaggcagtggatctgggacagatttcactctcacaatctccagagtggaggctgaggacctgggagtttattactgtcagcaatattatgcctatccgtggacgttcggtggaggcacaaagttggagatcaaatccggaggtggtggatccgaggtgcagctggtcgagtctggaggaggattggtgcagcctggagggtcattgaaactctcatgtgcagcctctggattcaccttcaataagtacgccatgaactgggtccgccaggctccaggaaagggtttggaatgggttgctcgcataagaagtaaatataataattatgcaacatattatgccgattcagtgaaagacaggttcaccatctccagagatgattcaaaaaacactgcctatctacaaatgaacaacttgaaaactgaggacactgccgtgtactactgtgtgagacatgggaacttcggtaatagctacatatcctactgggcttactggggccaagggactctggtcaccgtctcctcaggtggtggtggttctggcggcggcggctccggtggtggtggttctcagactgttgtgactcaggaaccttcactcaccgtatcacctggtggaacagtcacactcacttgtggctcctcgactggggctgttacatctggcaactacccaaactgggtccaacaaaaaccaggtcaggcaccccgtggtctaataggtgggactaagttcctcgcccccggtactcctgccagattctcaggctccctgcttggaggcaaggctgccctcaccctctcaggggtacagccagaggatgaggcagaatattactgtgttctatggtacagcaaccgctgggtgttcggtggaggaaccaaactgactgtccta

SEQ ID NO: 1428 - protein, 119 aa, Artificial Sequence
  ME63F2-H
QVQLVQSGAEVKRPGASVKVSCKASGYTFTSYWLHWVRQTPGQRLEWIGMIDPSNSDTRFNPNFKDRVTMTVDTSANTAYMELSSLRSEDTAVYYCATYGSYVSPLDYWGQGTSVTVSS

SEQ ID NO: 1429 - protein, 5 aa, Artificial Sequence
  ME63F2-HCDR1
SYWLH

SEQ ID NO: 1430 - protein, 17 aa, Artificial Sequence
  ME63F2-HCDR2
MIDPSNSDTRFNPNFKD

SEQ ID NO: 1431 - protein, 10 aa, Artificial Sequence
  ME63F2-HCDR3
YGSYVSPLDY

SEQ ID NO: 1432 - DNA, 357 bp, Artificial Sequence
  ME63F2-H
caggtgcagctggtccagtctggggctgaagtgaagaggcctggggcttcagtgaaagtgtcctgcaaggcttcgggctataccttcaccagctactggttgcactgggttagacagacgcctggacaaaggcttgagtggataggcatgattgatccttccaatagtgacactaggtttaatccgaacttcaaggacagggtcacaatgactgtagacacatctgccaacacagcctacatggaactcagcagcctgagatctgaggacactgcagtctattactgtgccacatatggtagctacgtttcccctctggactactggggtcaaggaacctcggtcaccgtctcctca

SEQ ID NO: 1433 - protein, 113 aa, Artificial Sequence
  ME63F2-L
DIVMTQTPLSLPVTVGEQASISCKSSQSLLYTSSQKNYLAWYQQKPGQSPKLLIYWASTRESGVPDRFSGSGSGTDFTLKISRVEAEDLGVYYCQQYYAYPWTFGGGTKLEIK

SEQ ID NO: 1434 - protein, 17 aa, Artificial Sequence
  ME63F2-LCDR1
KSSQSLLYTSSQKNYLA

SEQ ID NO: 1435 - protein, 7 aa, Artificial Sequence
  ME63F2-LCDR2
WASTRES

SEQ ID NO: 1436 - protein, 9 aa, Artificial Sequence
  ME63F2-LCDR3
QQYYAYPWT

SEQ ID NO: 1437 - DNA, 339 bp, Artificial Sequence
  ME63F2-L
gacatcgtgatgacccagactccactctccctacctgtgacagttggagagcaggcttctatcagctgcaagtccagtcagtcccttttatatactagcagtcagaagaactacttggcctggtaccagcagaaaccaggtcagtctcctaaactgctgatttactgggcatccactagggaatctggggtccctgatcgcttctcaggcagtggatctgggacagatttcactctcaaaatctccagagtggaggctgaggacctgggagtttattactgtcagcaatattatgcctatccgtggacgttcggtggaggcacaaagttggagatcaaa

SEQ ID NO: 1438 - protein, 247 aa, Artificial Sequence
  ME63F2-HL
QVQLVQSGAEVKRPGASVKVSCKASGYTFTSYWLHWVRQTPGQRLEWIGMIDPSNSDTRFNPNFKDRVTMTVDTSANTAYMELSSLRSEDTAVYYCATYGSYVSPLDYWGQGTSVTVSSGGGGSGGGGSGGGGSDIVMTQTPLSLPVTVGEQASISCKSSQSLLYTSSQKNYLAWYQQKPGQSPKLLIYWASTRESGVPDRFSGSGSGTDFTLKISRVEAEDLGVYYCQQYYAYPWTFGGGTKLEIK

SEQ ID NO: 1439 - DNA, 741 bp, Artificial Sequence
  ME63F2-HL
caggtgcagctggtccagtctggggctgaagtgaagaggcctggggcttcagtgaaagtgtcctgcaaggcttcgggctataccttcaccagctactggttgcactgggttagacagacgcctggacaaaggcttgagtggataggcatgattgatccttccaatagtgacactaggtttaatccgaacttcaaggacagggtcacaatgactgtagacacatctgccaacacagcctacatggaactcagcagcctgagatctgaggacactgcagtctattactgtgccacatatggtagctacgtttcccctctggactactggggtcaaggaacctcggtcaccgtctcctcaggtggtggtggttctggcggcggcggctccggtggtggtggttctgacatcgtgatgacccagactccactctccctacctgtgacagttggagagcaggcttctatcagctgcaagtccagtcagtcccttttatatactagcagtcagaagaactacttggcctggtaccagcagaaaccaggtcagtctcctaaactgctgatttactgggcatccactagggaatctggggtccctgatcgcttctcaggcagtggatctgggacagatttcactctcaaaatctccagagtggaggctgaggacctgggagtttattactgtcagcaatattatgcctatccgtggacgttcggtggaggcacaaagttggagatcaaa

SEQ ID NO: 1440 - protein, 502 aa, Artificial Sequence
  ME63F2 HL x I2C HL
QVQLVQSGAEVKRPGASVKVSCKASGYTFTSYWLHWVRQTPGQRLEWIGMIDPSNSDTRFNPNFKDRVTMTVDTSANTAYMELSSLRSEDTAVYYCATYGSYVSPLDYWGQGTSVTVSSGGGGSGGGGSGGGGSDIVMTQTPLSLPVTVGEQASISCKSSQSLLYTSSQKNYLAWYQQKPGQSPKLLIYWASTRESGVPDRFSGSGSGTDFTLKISRVEAEDLGVYYCQQYYAYPWTFGGGTKLEIKSGGGGSEVQLVESGGGLVQPGGSLKLSCAASGFTFNKYAMNWVRQAPGKGLEWVARIRSKYNNYATYYADSVKDRFTISRDDSKNTAYLQMNNLKTEDTAVYYCVRHGNFGNSYISYWAYWGQGTLVTVSSGGGGSGGGGSGGGGSQTVVTQEPSLTVSPGGTVTLTCGSSTGAVTSGNYPNWVQQKPGQAPRGLIGGTKFLAPGTPARFSGSLLGGKAALTLSGVQPEDEAEYYCVLWYSNRWVFGGGTKLTVL

SEQ ID NO: 1441 - DNA, 1506 bp, Artificial Sequence
  ME63F2 HL x I2C HL
caggtgcagctggtccagtctggggctgaagtgaagaggcctggggcttcagtgaaagtgtcctgcaaggcttcgggctataccttcaccagctactggttgcactgggttagacagacgcctggacaaaggcttgagtggataggcatgattgatccttccaatagtgacactaggtttaatccgaacttcaaggacagggtcacaatgactgtagacacatctgccaacacagcctacatggaactcagcagcctgagatctgaggacactgcagtctattactgtgccacatatggtagctacgtttcccctctggactactggggtcaaggaacctcggtcaccgtctcctcaggtggtggtggttctggcggcggcggctccggtggtggtggttctgacatcgtgatgacccagactccactctccctacctgtgacagttggagagcaggcttctatcagctgcaagtccagtcagtcccttttatatactagcagtcagaagaactacttggcctggtaccagcagaaaccaggtcagtctcctaaactgctgatttactgggcatccactagggaatctggggtccctgatcgcttctcaggcagtggatctgggacagatttcactctcaaaatctccagagtggaggctgaggacctgggagtttattactgtcagcaatattatgcctatccgtggacgttcggtggaggcacaaagttggagatcaaatccggaggtggtggatccgaggtgcagctggtcgagtctggaggaggattggtgcagcctggagggtcattgaaactctcatgtgcagcctctggattcaccttcaataagtacgccatgaactgggtccgccaggctccaggaaagggtttggaatgggttgctcgcataagaagtaaatataataattatgcaacatattatgccgattcagtgaaagacaggttcaccatctccagagatgattcaaaaaacactgcctatctacaaatgaacaacttgaaaactgaggacactgccgtgtactactgtgtgagacatgggaacttcggtaatagctacatatcctactgggcttactggggccaagggactctggtcaccgtctcctcaggtggtggtggttctggcggcggcggctccggtggtggtggttctcagactgttgtgactcaggaaccttcactcaccgtatcacctggtggaacagtcacactcacttgtggctcctcgactggggctgttacatctggcaactacccaaactgggtccaacaaaaaccaggtcaggcaccccgtggtctaataggtgggactaagttcctcgcccccggtactcctgccagattctcaggctccctgcttggaggcaaggctgccctcaccctctcaggggtacagccagaggatgaggcagaatattactgtgttctatggtacagcaaccgctgggtgttcggtggaggaaccaaactgactgtccta

SEQ ID NO: 1442 - protein, 119 aa, Artificial Sequence
  ME62D11-H
QVQLVQSGPEVVKPGASVKVSCKASGYTFTSYWLHWVKQAPGQGLEWIGMIDPSNSDTRFNPNFKDRATLTVDTSASTAYMLLSSLRSEDTAVYYCATYGSYVSPLDYWGQGTSVTVSS

SEQ ID NO: 1443 - protein, 5 aa, Artificial Sequence
  ME62D11-HCDR1
SYWLH

SEQ ID NO: 1444 - protein, 17 aa, Artificial Sequence
  ME62D11-HCDR2
MIDPSNSDTRFNPNFKD

SEQ ID NO: 1445 - protein, 10 aa, Artificial Sequence
  ME62D11-HCDR3
YGSYVSPLDY

SEQ ID NO: 1446 - DNA, 357 bp, Artificial Sequence
  ME62D11-H
caggtgcagctggtccagtctgggcctgaagtggtgaagcctggggcttcagtgaaagtgtcctgcaaggcttcgggctataccttcaccagctactggttgcactgggttaaacaggcgcctggacaagggcttgagtggataggcatgattgatccttccaatagtgacactaggtttaatccgaacttcaaggacagggccacattgactgtagacacatctgccagcacagcctacatgctactcagcagcctgagatctgaggacactgcagtctattactgtgccacatatggtagctacgtttcccctctggactactggggtcaaggaacctcggtcaccgtctcctca

SEQ ID NO: 1447 - protein, 113 aa, Artificial Sequence
  ME62D11-L
DIVMTQTPSSLPVTLGETVSISCKSSQSLLYTSSQKNYLAWYLQKPGQSPQLLIYWASTRESGVPDRFSGSGSGTDFTLTISRVKAEDVAVYYCQQYYAYPWTFGGGTKLEIK

SEQ ID NO: 1448 - protein, 17 aa, Artificial Sequence
  ME62D11-LCDR1
KSSQSLLYTSSQKNYLA

SEQ ID NO: 1449 - protein, 7 aa, Artificial Sequence
  ME62D11-LCDR2
WASTRES

SEQ ID NO: 1450 - protein, 9 aa, Artificial Sequence
  ME62D11-LCDR3
QQYYAYPWT

SEQ ID NO: 1451 - DNA, 339 bp, Artificial Sequence
  ME62D11-L
gacatcgtgatgacccagactccatcctccctacctgtgacacttggagagacggtttctatcagctgcaagtccagtcagtcccttttatatactagcagtcagaagaactacttggcctggtacctgcagaaaccaggtcagtctcctcaactgctgatttactgggcatccactagggaatctggggtccctgatcgcttctcaggcagtggatctgggacagatttcactctcacaatctccagagtgaaggctgaggacgtggcagtttattactgtcagcaatattatgcctatccgtggacgttcggtggaggcacaaagttggagatcaaa

SEQ ID NO: 1452 - protein, 247 aa, Artificial Sequence
  ME62D11-HL
QVQLVQSGPEVVKPGASVKVSCKASGYTFTSYWLHWVKQAPGQGLEWIGMIDPSNSDTRFNPNFKDRATLTVDTSASTAYMLLSSLRSEDTAVYYCATYGSYVSPLDYWGQGTSVTVSSGGGGSGGGGSGGGGSDIVMTQTPSSLPVTLGETVSISCKSSQSLLYTSSQKNYLAWYLQKPGQSPQLLIYWASTRESGVPDRFSGSGSGTDFTLTISRVKAEDVAVYYCQQYYAYPWTFGGGTKLEIK

SEQ ID NO: 1453 - DNA, 741 bp, Artificial Sequence
  ME62D11-HL
caggtgcagctggtccagtctgggcctgaagtggtgaagcctggggcttcagtgaaagtgtcctgcaaggcttcgggctataccttcaccagctactggttgcactgggttaaacaggcgcctggacaagggcttgagtggataggcatgattgatccttccaatagtgacactaggtttaatccgaacttcaaggacagggccacattgactgtagacacatctgccagcacagcctacatgctactcagcagcctgagatctgaggacactgcagtctattactgtgccacatatggtagctacgtttcccctctggactactggggtcaaggaacctcggtcaccgtctcctcaggtggtggtggttctggcggcggcggctccggtggtggtggttctgacatcgtgatgacccagactccatcctccctacctgtgacacttggagagacggtttctatcagctgcaagtccagtcagtcccttttatatactagcagtcagaagaactacttggcctggtacctgcagaaaccaggtcagtctcctcaactgctgatttactgggcatccactagggaatctggggtccctgatcgcttctcaggcagtggatctgggacagatttcactctcacaatctccagagtgaaggctgaggacgtggcagtttattactgtcagcaatattatgcctatccgtggacgttcggtggaggcacaaagttggagatcaaa

SEQ ID NO: 1454 - protein, 502 aa, Artificial Sequence
  ME62D11 HL x I2C HL
QVQLVQSGPEVVKPGASVKVSCKASGYTFTSYWLHWVKQAPGQGLEWIGMIDPSNSDTRFNPNFKDRATLTVDTSASTAYMLLSSLRSEDTAVYYCATYGSYVSPLDYWGQGTSVTVSSGGGGSGGGGSGGGGSDIVMTQTPSSLPVTLGETVSISCKSSQSLLYTSSQKNYLAWYLQKPGQSPQLLIYWASTRESGVPDRFSGSGSGTDFTLTISRVKAEDVAVYYCQQYYAYPWTFGGGTKLEIKSGGGGSEVQLVESGGGLVQPGGSLKLSCAASGFTFNKYAMNWVRQAPGKGLEWVARIRSKYNNYATYYADSVKDRFTISRDDSKNTAYLQMNNLKTEDTAVYYCVRHGNFGNSYISYWAYWGQGTLVTVSSGGGGSGGGGSGGGGSQTVVTQEPSLTVSPGGTVTLTCGSSTGAVTSGNYPNWVQQKPGQAPRGLIGGTKFLAPGTPARFSGSLLGGKAALTLSGVQPEDEAEYYCVLWYSNRWVFGGGTKLTVL

SEQ ID NO: 1455 - DNA, 1506 bp, Artificial Sequence
  ME62D11 HL x I2C HL
caggtgcagctggtccagtctgggcctgaagtggtgaagcctggggcttcagtgaaagtgtcctgcaaggcttcgggctataccttcaccagctactggttgcactgggttaaacaggcgcctggacaagggcttgagtggataggcatgattgatccttccaatagtgacactaggtttaatccgaacttcaaggacagggccacattgactgtagacacatctgccagcacagcctacatgctactcagcagcctgagatctgaggacactgcagtctattactgtgccacatatggtagctacgtttcccctctggactactggggtcaaggaacctcggtcaccgtctcctcaggtggtggtggttctggcggcggcggctccggtggtggtggttctgacatcgtgatgacccagactccatcctccctacctgtgacacttggagagacggtttctatcagctgcaagtccagtcagtcccttttatatactagcagtcagaagaactacttggcctggtacctgcagaaaccaggtcagtctcctcaactgctgatttactgggcatccactagggaatctggggtccctgatcgcttctcaggcagtggatctgggacagatttcactctcacaatctccagagtgaaggctgaggacgtggcagtttattactgtcagcaatattatgcctatccgtggacgttcggtggaggcacaaagttggagatcaaatccggaggtggtggatccgaggtgcagctggtcgagtctggaggaggattggtgcagcctggagggtcattgaaactctcatgtgcagcctctggattcaccttcaataagtacgccatgaactgggtccgccaggctccaggaaagggtttggaatgggttgctcgcataagaagtaaatataataattatgcaacatattatgccgattcagtgaaagacaggttcaccatctccagagatgattcaaaaaacactgcctatctacaaatgaacaacttgaaaactgaggacactgccgtgtactactgtgtgagacatgggaacttcggtaatagctacatatcctactgggcttactggggccaagggactctggtcaccgtctcctcaggtggtggtggttctggcggcggcggctccggtggtggtggttctcagactgttgtgactcaggaaccttcactcaccgtatcacctggtggaacagtcacactcacttgtggctcctcgactggggctgttacatctggcaactacccaaactgggtccaacaaaaaccaggtcaggcaccccgtggtctaataggtgggactaagttcctcgcccccggtactcctgccagattctcaggctccctgcttggaggcaaggctgccctcaccctctcaggggtacagccagaggatgaggcagaatattactgtgttctatggtacagcaaccgctgggtgttcggtggaggaaccaaactgactgtccta

SEQ ID NO: 1456 - protein, 119 aa, Artificial Sequence
  ME62C10-H
QVQLVQSGAELKKPGASVKVSCKASGYTFTSYWLHWVKQAPGQRLEWIGMIDPSNSDTRFNPNFKDRVTITVDTSANTAYMELSSLRSEDTAVYYCATYGSYVSPLDYWGQGTSVTVSS

SEQ ID NO: 1457 - protein, 5 aa, Artificial Sequence
  ME62C10-HCDR1
SYWLH

SEQ ID NO: 1458 - protein, 17 aa, Artificial Sequence
  ME62C10-HCDR2
MIDPSNSDTRFNPNFKD

SEQ ID NO: 1459 - protein, 10 aa, Artificial Sequence
  ME62C10-HCDR3
YGSYVSPLDY

SEQ ID NO: 1460 - DNA, 357 bp, Artificial Sequence
  ME62C10-H
caggtgcagctggtccagtctggggctgaactgaagaagcctggggcttcagtgaaagtgtcctgcaaggcttcgggctataccttcaccagctactggttgcactgggttaaacaggcgcctggacaaaggcttgagtggataggcatgattgatccttccaatagtgacactaggtttaatccgaacttcaaggacagggtcacaatcactgtagacacatctgccaacacagcctacatggagctcagcagcctgagatctgaggacactgcagtctattactgtgccacatatggtagctacgtttcccctctggactactggggtcaaggaacctcggtcaccgtctcctca

SEQ ID NO: 1461 - protein, 113 aa, Artificial Sequence
  ME62C10-L
DIVMTQTPPSLTVTPGEQVSISCKSSQSLLYTSSQKNYLAWYLQKPGQSPKLLIYWASTRESGVPDRFSGSGSGTDFTLKISSVEADDVGVYYCQQYYAYPWTFGGGTKLEIK

SEQ ID NO: 1462 - protein, 17 aa, Artificial Sequence
  ME62C10-LCDR1
KSSQSLLYTSSQKNYLA

SEQ ID NO: 1463 - protein, 7 aa, Artificial Sequence
  ME62C10-LCDR2
WASTRES

SEQ ID NO: 1464 - protein, 9 aa, Artificial Sequence
  ME62C10-LCDR3
QQYYAYPWT

SEQ ID NO: 1465 - DNA, 339 bp, Artificial Sequence
  ME62C10-L
gacatcgtgatgacccagactccaccctccctaactgtgacacctggagagcaggtttctatcagctgcaagtccagtcagtcccttttatatactagcagtcagaagaactacttggcctggtacctgcagaaaccaggtcagtctcctaaactgctgatttactgggcatccactagggaatctggggtccctgatcgcttctcaggcagtggatctgggacagatttcactctcaaaatctccagtgtggaggctgacgacgtgggagtttattactgtcagcaatattatgcctatccgtggacgttcggtggaggcacaaagttggagatcaaa

SEQ ID NO: 1466 - protein, 247 aa, Artificial Sequence
  ME62C10-HL
QVQLVQSGAELKKPGASVKVSCKASGYTFTSYWLHWVKQAPGQRLEWIGMIDPSNSDTRFNPNFKDRVTITVDTSANTAYMELSSLRSEDTAVYYCATYGSYVSPLDYWGQGTSVTVSSGGGGSGGGGSGGGGSDIVMTQTPPSLTVTPGEQVSISCKSSQSLLYTSSQKNYLAWYLQKPGQSPKLLIYWASTRESGVPDRFSGSGSGTDFTLKISSVEADDVGVYYCQQYYAYPWTFGGGTKLEIK

SEQ ID NO: 1467 - DNA, 741 bp, Artificial Sequence
  ME62C10-HL
caggtgcagctggtccagtctggggctgaactgaagaagcctggggcttcagtgaaagtgtcctgcaaggcttcgggctataccttcaccagctactggttgcactgggttaaacaggcgcctggacaaaggcttgagtggataggcatgattgatccttccaatagtgacactaggtttaatccgaacttcaaggacagggtcacaatcactgtagacacatctgccaacacagcctacatggagctcagcagcctgagatctgaggacactgcagtctattactgtgccacatatggtagctacgtttcccctctggactactggggtcaaggaacctcggtcaccgtctcctcaggtggtggtggttctggcggcggcggctccggtggtggtggttctgacatcgtgatgacccagactccaccctccctaactgtgacacctggagagcaggtttctatcagctgcaagtccagtcagtcccttttatatactagcagtcagaagaactacttggcctggtacctgcagaaaccaggtcagtctcctaaactgctgatttactgggcatccactagggaatctggggtccctgatcgcttctcaggcagtggatctgggacagatttcactctcaaaatctccagtgtggaggctgacgacgtgggagtttattactgtcagcaatattatgcctatccgtggacgttcggtggaggcacaaagttggagatcaaa

SEQ ID NO: 1468 - protein, 502 aa, Artificial Sequence
  ME62C10 HL x I2C HL
QVQLVQSGAELKKPGASVKVSCKASGYTFTSYWLHWVKQAPGQRLEWIGMIDPSNSDTRFNPNFKDRVTITVDTSANTAYMELSSLRSEDTAVYYCATYGSYVSPLDYWGQGTSVTVSSGGGGSGGGGSGGGGSDIVMTQTPPSLTVTPGEQVSISCKSSQSLLYTSSQKNYLAWYLQKPGQSPKLLIYWASTRESGVPDRFSGSGSGTDFTLKISSVEADDVGVYYCQQYYAYPWTFGGGTKLEIKSGGGGSEVQLVESGGGLVQPGGSLKLSCAASGFTFNKYAMNWVRQAPGKGLEWVARIRSKYNNYATYYADSVKDRFTISRDDSKNTAYLQMNNLKTEDTAVYYCVRHGNFGNSYISYWAYWGQGTLVTVSSGGGGSGGGGSGGGGSQTVVTQEPSLTVSPGGTVTLTCGSSTGAVTSGNYPNWVQQKPGQAPRGLIGGTKFLAPGTPARFSGSLLGGKAALTLSGVQPEDEAEYYCVLWYSNRWVFGGGTKLTVL

SEQ ID NO: 1469 - DNA, 1506 bp, Artificial Sequence
  ME62C10 HL x I2C HL
caggtgcagctggtccagtctggggctgaactgaagaagcctggggcttcagtgaaagtgtcctgcaaggcttcgggctataccttcaccagctactggttgcactgggttaaacaggcgcctggacaaaggcttgagtggataggcatgattgatccttccaatagtgacactaggtttaatccgaacttcaaggacagggtcacaatcactgtagacacatctgccaacacagcctacatggagctcagcagcctgagatctgaggacactgcagtctattactgtgccacatatggtagctacgtttcccctctggactactggggtcaaggaacctcggtcaccgtctcctcaggtggtggtggttctggcggcggcggctccggtggtggtggttctgacatcgtgatgacccagactccaccctccctaactgtgacacctggagagcaggtttctatcagctgcaagtccagtcagtcccttttatatactagcagtcagaagaactacttggcctggtacctgcagaaaccaggtcagtctcctaaactgctgatttactgggcatccactagggaatctggggtccctgatcgcttctcaggcagtggatctgggacagatttcactctcaaaatctccagtgtggaggctgacgacgtgggagtttattactgtcagcaatattatgcctatccgtggacgttcggtggaggcacaaagttggagatcaaatccggaggtggtggatccgaggtgcagctggtcgagtctggaggaggattggtgcagcctggagggtcattgaaactctcatgtgcagcctctggattcaccttcaataagtacgccatgaactgggtccgccaggctccaggaaagggtttggaatgggttgctcgcataagaagtaaatataataattatgcaacatattatgccgattcagtgaaagacaggttcaccatctccagagatgattcaaaaaacactgcctatctacaaatgaacaacttgaaaactgaggacactgccgtgtactactgtgtgagacatgggaacttcggtaatagctacatatcctactgggcttactggggccaagggactctggtcaccgtctcctcaggtggtggtggttctggcggcggcggctccggtggtggtggttctcagactgttgtgactcaggaaccttcactcaccgtatcacctggtggaacagtcacactcacttgtggctcctcgactggggctgttacatctggcaactacccaaactgggtccaacaaaaaccaggtcaggcaccccgtggtctaataggtgggactaagttcctcgcccccggtactcctgccagattctcaggctccctgcttggaggcaaggctgccctcaccctctcaggggtacagccagaggatgaggcagaatattactgtgttctatggtacagcaaccgctgggtgttcggtggaggaaccaaactgactgtccta

SEQ ID NO: 1470 - protein, 119 aa, Artificial Sequence
  ME62A4-H
QVQLVQSGAEVMKPGASVKVSCRASGYTFTSYWLHWVRQAPGQGLEWIGMIDPSNSDTRFNPNFKDRVTMTVDTSSSTAYMELSSLRSEDTAVYYCATYGSYVSPLDYWGQGTSVTVSS

SEQ ID NO: 1471 - protein, 5 aa, Artificial Sequence
  ME62A4-HCDR1
SYWLH

SEQ ID NO: 1472 - protein, 17 aa, Artificial Sequence
  ME62A4-HCDR2
MIDPSNSDTRFNPNFKD

SEQ ID NO: 1473 - protein, 10 aa, Artificial Sequence
  ME62A4-HCDR3
YGSYVSPLDY

SEQ ID NO: 1474 - DNA, 357 bp, Artificial Sequence
  ME62A4-H
caggtgcagctggtccagtctggggctgaagtgatgaagcctggggcttcagtgaaagtgtcctgcagggcttcgggctataccttcaccagctactggttgcactgggttagacaggcgcctggacaagggcttgagtggataggcatgattgatccttccaatagtgacactaggtttaatccgaacttcaaggacagggtcacaatgactgtagacacatcttccagcacagcctacatggagctcagcagcctgagatctgaggacactgcagtctattactgtgccacatatggtagctacgtttcccctctggactactggggtcaaggaacctcggtcaccgtctcctca

SEQ ID NO: 1475 - protein, 113 aa, Artificial Sequence
  ME62A4-L
DIVMTQTPFSLPVTAGETVSISCKSSQSLLYTSSQKNYLAWYLQKPGQSPQLLIYWASTRESGVPDRFSGSGSGTDFTLKISRVEAEDVGVYYCQQYYAYPWTFGGGTKLEIK

SEQ ID NO: 1476 - protein, 17 aa, Artificial Sequence
  ME62A4-LCDR1
KSSQSLLYTSSQKNYLA

SEQ ID NO: 1477 - protein, 7 aa, Artificial Sequence
  ME62A4-LCDR2
WASTRES

SEQ ID NO: 1478 - protein, 9 aa, Artificial Sequence
  ME62A4-LCDR3
QQYYAYPWT

SEQ ID NO: 1479 - DNA, 339 bp, Artificial Sequence
  ME62A4-L
gacatcgtgatgacccagactccattctccctacctgtgacagctggagagacggtttctatcagctgcaagtccagtcagtcccttttatatactagcagtcagaagaactacttggcctggtacctgcagaaaccaggtcagtctcctcaactgctgatttactgggcatccactagggaatctggggtccctgatcgcttctcaggcagtggatctgggacagatttcactctcaaaatctccagagtggaggctgaggacgtgggagtttattactgtcagcaatattatgcctatccgtggacgttcggtggaggcacaaagttggagatcaaa

SEQ ID NO: 1480 - protein, 247 aa, Artificial Sequence
  ME62A4-HL
QVQLVQSGAEVMKPGASVKVSCRASGYTFTSYWLHWVRQAPGQGLEWIGMIDPSNSDTRFNPNFKDRVTMTVDTSSSTAYMELSSLRSEDTAVYYCATYGSYVSPLDYWGQGTSVTVSSGGGGSGGGGSGGGGSDIVMTQTPFSLPVTAGETVSISCKSSQSLLYTSSQKNYLAWYLQKPGQSPQLLIYWASTRESGVPDRFSGSGSGTDFTLKISRVEAEDVGVYYCQQYYAYPWTFGGGTKLEIK

SEQ ID NO: 1481 - DNA, 741 bp, Artificial Sequence
  ME62A4-HL
caggtgcagctggtccagtctggggctgaagtgatgaagcctggggcttcagtgaaagtgtcctgcagggcttcgggctataccttcaccagctactggttgcactgggttagacaggcgcctggacaagggcttgagtggataggcatgattgatccttccaatagtgacactaggtttaatccgaacttcaaggacagggtcacaatgactgtagacacatcttccagcacagcctacatggagctcagcagcctgagatctgaggacactgcagtctattactgtgccacatatggtagctacgtttcccctctggactactggggtcaaggaacctcggtcaccgtctcctcaggtggtggtggttctggcggcggcggctccggtggtggtggttctgacatcgtgatgacccagactccattctccctacctgtgacagctggagagacggtttctatcagctgcaagtccagtcagtcccttttatatactagcagtcagaagaactacttggcctggtacctgcagaaaccaggtcagtctcctcaactgctgatttactgggcatccactagggaatctggggtccctgatcgcttctcaggcagtggatctgggacagatttcactctcaaaatctccagagtggaggctgaggacgtgggagtttattactgtcagcaatattatgcctatccgtggacgttcggtggaggcacaaagttggagatcaaa

SEQ ID NO: 1482 - protein, 502 aa, Artificial Sequence
  ME62A4 HL x I2C HL
QVQLVQSGAEVMKPGASVKVSCRASGYTFTSYWLHWVRQAPGQGLEWIGMIDPSNSDTRFNPNFKDRVTMTVDTSSSTAYMELSSLRSEDTAVYYCATYGSYVSPLDYWGQGTSVTVSSGGGGSGGGGSGGGGSDIVMTQTPFSLPVTAGETVSISCKSSQSLLYTSSQKNYLAWYLQKPGQSPQLLIYWASTRESGVPDRFSGSGSGTDFTLKISRVEAEDVGVYYCQQYYAYPWTFGGGTKLEIKSGGGGSEVQLVESGGGLVQPGGSLKLSCAASGFTFNKYAMNWVRQAPGKGLEWVARIRSKYNNYATYYADSVKDRFTISRDDSKNTAYLQMNNLKTEDTAVYYCVRHGNFGNSYISYWAYWGQGTLVTVSSGGGGSGGGGSGGGGSQTVVTQEPSLTVSPGGTVTLTCGSSTGAVTSGNYPNWVQQKPGQAPRGLIGGTKFLAPGTPARFSGSLLGGKAALTLSGVQPEDEAEYYCVLWYSNRWVFGGGTKLTVL

SEQ ID NO: 1483 - DNA, 1506 bp, Artificial Sequence
  ME62A4 HL x I2C HL
caggtgcagctggtccagtctggggctgaagtgatgaagcctggggcttcagtgaaagtgtcctgcagggcttcgggctataccttcaccagctactggttgcactgggttagacaggcgcctggacaagggcttgagtggataggcatgattgatccttccaatagtgacactaggtttaatccgaacttcaaggacagggtcacaatgactgtagacacatcttccagcacagcctacatggagctcagcagcctgagatctgaggacactgcagtctattactgtgccacatatggtagctacgtttcccctctggactactggggtcaaggaacctcggtcaccgtctcctcaggtggtggtggttctggcggcggcggctccggtggtggtggttctgacatcgtgatgacccagactccattctccctacctgtgacagctggagagacggtttctatcagctgcaagtccagtcagtcccttttatatactagcagtcagaagaactacttggcctggtacctgcagaaaccaggtcagtctcctcaactgctgatttactgggcatccactagggaatctggggtccctgatcgcttctcaggcagtggatctgggacagatttcactctcaaaatctccagagtggaggctgaggacgtgggagtttattactgtcagcaatattatgcctatccgtggacgttcggtggaggcacaaagttggagatcaaatccggaggtggtggatccgaggtgcagctggtcgagtctggaggaggattggtgcagcctggagggtcattgaaactctcatgtgcagcctctggattcaccttcaataagtacgccatgaactgggtccgccaggctccaggaaagggtttggaatgggttgctcgcataagaagtaaatataataattatgcaacatattatgccgattcagtgaaagacaggttcaccatctccagagatgattcaaaaaacactgcctatctacaaatgaacaacttgaaaactgaggacactgccgtgtactactgtgtgagacatgggaacttcggtaatagctacatatcctactgggcttactggggccaagggactctggtcaccgtctcctcaggtggtggtggttctggcggcggcggctccggtggtggtggttctcagactgttgtgactcaggaaccttcactcaccgtatcacctggtggaacagtcacactcacttgtggctcctcgactggggctgttacatctggcaactacccaaactgggtccaacaaaaaccaggtcaggcaccccgtggtctaataggtgggactaagttcctcgcccccggtactcctgccagattctcaggctccctgcttggaggcaaggctgccctcaccctctcaggggtacagccagaggatgaggcagaatattactgtgttctatggtacagcaaccgctgggtgttcggtggaggaaccaaactgactgtccta

SEQ ID NO: 1484 - protein, 126 aa, Mus sp.
EVQLLEQSGAELVRPGTSVKMSCKAAGYTFTKYWIGWVKQRPGHGLEWIGDIHPGGGYANYNEKFKGKATLTADTSSSTAYMQLSRLTSDDSAIYYCARSGYDYGSSYDYHGMDFWGQGTTVTVSS

SEQ ID NO: 1485 - protein, 5 aa, Mus sp.
KYWIG

SEQ ID NO: 1486 - protein, 17 aa, Mus sp.
DIHPGGGYANYNEKFKG

SEQ ID NO: 1487 - protein, 16 aa, Mus sp.
SGYDYGSSYDYHGMDF

SEQ ID NO: 1488 - DNA, 378 bp, Mus sp.
gaggtgcagctgctcgagcagtctggagctgagctggttaggcctgggacttcagtgaagatgtcctgcaaggctgctggatacaccttcactaagtactggataggttgggtaaagcagaggcctggacatggccttgagtggattggagatattcaccctggaggtggttatgctaactacaatgagaagttcaagggcaaggccacactgactgcagacacatcctccagcacagcctacatgcagctcagcagactgacatctgatgactccgccatctattactgtgcaagatcggggtatgactacggtagtagttacgattaccatggtatggacttctggggccaagggaccacggtcaccgtctcctca

SEQ ID NO: 1489 - protein, 107 aa, Mus sp.
ELQMTQSPASLSASVGEPVTFTCRASENIYSYLAWYQQKQGKSPQLLIYGATNLADGMSSRFSGSGSGRQYSLKISSLHPDDVATYYCQNVLSTPYTFGGGTKLEIK

SEQ ID NO: 1490 - protein, 11 aa, Mus sp.
RASENIYSYLA

SEQ ID NO: 1491 - protein, 7 aa, Mus sp.
GATNLAD

SEQ ID NO: 1492 - protein, 9 aa, Mus sp.
QNVLSTPYT

SEQ ID NO: 1493 - DNA, 321 bp, Mus sp.
gagctccagatgacccagtctccagcctccctatctgcatctgtgggagaacctgtcaccttcacatgtcgagcaagtgagaatatttacagttatttagcatggtatcagcagaaacagggaaaatctcctcagctcctgatctatggtgcaaccaacttggcagatggcatgtcatcgaggttcagtggcagtggatctggtagacagtattctctcaagatcagtagcctgcatcctgacgatgttgcaacgtattactgtcaaaatgtgttaagtactccgtacacgttcggaggggggaccaagcttgagatcaaa

SEQ ID NO: 1494 - protein, 248 aa, Mus sp.
EVQLLEQSGAELVRPGTSVKMSCKAAGYTFTKYWIGWVKQRPGHGLEWIGDIHPGGGYANYNEKFKGKATLTADTSSSTAYMQLSRLTSDDSAIYYCARSGYDYGSSYDYHGMDFWGQGTTVTVSSGGGGSGGGGSGGGGSELQMTQSPASLSASVGEPVTFTCRASENIYSYLAWYQQKQGKSPQLLIYGATNLADGMSSRFSGSGSGRQYSLKISSLHPDDVATYYCQNVLSTPYTFGGGTKLEIK

SEQ ID NO: 1495 - DNA, 744 bp, Mus sp.
gaggtgcagctgctcgagcagtctggagctgagctggttaggcctgggacttcagtgaagatgtcctgcaaggctgctggatacaccttcactaagtactggataggttgggtaaagcagaggcctggacatggccttgagtggattggagatattcaccctggaggtggttatgctaactacaatgagaagttcaagggcaaggccacactgactgcagacacatcctccagcacagcctacatgcagctcagcagactgacatctgatgactccgccatctattactgtgcaagatcggggtatgactacggtagtagttacgattaccatggtatggacttctggggccaagggaccacggtcaccgtctcctcaggtggtggtggttctggcggcggcggctccggtggtggtggttctgagctccagatgacccagtctccagcctccctatctgcatctgtgggagaacctgtcaccttcacatgtcgagcaagtgagaatatttacagttatttagcatggtatcagcagaaacagggaaaatctcctcagctcctgatctatggtgcaaccaacttggcagatggcatgtcatcgaggttcagtggcagtggatctggtagacagtattctctcaagatcagtagcctgcatcctgacgatgttgcaacgtattactgtcaaaatgtgttaagtactccgtacacgttcggaggggggaccaagcttgagatcaaa

SEQ ID NO: 1496 - protein, 503 aa, Mus sp.
EVQLLEQSGAELVRPGTSVKMSCKAAGYTFTKYWIGWVKQRPGHGLEWIGDIHPGGGYANYNEKFKGKATLTADTSSSTAYMQLSRLTSDDSAIYYCARSGYDYGSSYDYHGMDFWGQGTTVTVSSGGGGSGGGGSGGGGSELQMTQSPASLSASVGEPVTFTCRASENIYSYLAWYQQKQGKSPQLLIYGATNLADGMSSRFSGSGSGRQYSLKISSLHPDDVATYYCQNVLSTPYTFGGGTKLEIKSGGGGSEVQLVESGGGLVQPGGSLKLSCAASGFTFNKYAMNWVRQAPGKGLEWVARIRSKYNNYATYYADSVKDRFTISRDDSKNTAYLQMNNLKTEDTAVYYCVRHGNFGNSYISYWAYWGQGTLVTVSSGGGGSGGGGSGGGGSQTVVTQEPSLTVSPGGTVTLTCGSSTGAVTSGNYPNWVQQKPGQAPRGLIGGTKFLAPGTPARFSGSLLGGKAALTLSGVQPEDEAEYYCVLWYSNRWVFGGGTKLTVL

SEQ ID NO: 1497 - DNA, 1509 bp, Mus sp.
gaggtgcagctgctcgagcagtctggagctgagctggttaggcctgggacttcagtgaagatgtcctgcaaggctgctggatacaccttcactaagtactggataggttgggtaaagcagaggcctggacatggccttgagtggattggagatattcaccctggaggtggttatgctaactacaatgagaagttcaagggcaaggccacactgactgcagacacatcctccagcacagcctacatgcagctcagcagactgacatctgatgactccgccatctattactgtgcaagatcggggtatgactacggtagtagttacgattaccatggtatggacttctggggccaagggaccacggtcaccgtctcctcaggtggtggtggttctggcggcggcggctccggtggtggtggttctgagctccagatgacccagtctccagcctccctatctgcatctgtgggagaacctgtcaccttcacatgtcgagcaagtgagaatatttacagttatttagcatggtatcagcagaaacagggaaaatctcctcagctcctgatctatggtgcaaccaacttggcagatggcatgtcatcgaggttcagtggcagtggatctggtagacagtattctctcaagatcagtagcctgcatcctgacgatgttgcaacgtattactgtcaaaatgtgttaagtactccgtacacgttcggaggggggaccaagcttgagatcaaatccggaggtggtggatccgaggtgcagctggtcgagtctggaggaggattggtgcagcctggagggtcattgaaactctcatgtgcagcctctggattcaccttcaataagtacgccatgaactgggtccgccaggctccaggaaagggtttggaatgggttgctcgcataagaagtaaatataataattatgcaacatattatgccgattcagtgaaagacaggttcaccatctccagagatgattcaaaaaacactgcctatctacaaatgaacaacttgaaaactgaggacactgccgtgtactactgtgtgagacatgggaacttcggtaatagctacatatcctactgggcttactggggccaagggactctggtcaccgtctcctcaggtggtggtggttctggcggcggcggctccggtggtggtggttctcagactgttgtgactcaggaaccttcactcaccgtatcacctggtggaacagtcacactcacttgtggctcctcgactggggctgttacatctggcaactacccaaactgggtccaacaaaaaccaggtcaggcaccccgtggtctaataggtgggactaagttcctcgcccccggtactcctgccagattctcaggctccctgcttggaggcaaggctgccctcaccctctcaggggtacagccagaggatgaggcagaatattactgtgttctatggtacagcaaccgctgggtgttcggtggaggaaccaaactgactgtccta

SEQ ID NO: 1498 - protein, 127 aa, Mus sp.
EVQLLEQSGAELVRPGTSVKISCKATGYTFSNYWISWVKYRPGHGLEWIGDIYPGGSYTNYNEKFKGKVTLTADTSSRTAYMQLSGLTFEDSAIYYCARSGYDYGSDYDYHGMDYWGQGTTVTVSSG

SEQ ID NO: 1499 - protein, 5 aa, Mus sp.
NYWIS

SEQ ID NO: 1500 - protein, 17 aa, Mus sp.
DIYPGGSYTNYNEKFKG

SEQ ID NO: 1501 - protein, 16 aa, Mus sp.
SGYDYGSDYDYHGMDY

SEQ ID NO: 1502 - DNA, 378 bp, Mus sp.
gaggtgcagctgctcgagcagtctggagctgagctggtaaggcctgggacttcagtgaagatttcctgcaaggctactgggtacaccttcagtaattactggataagttgggtaaagtataggcctggacatggtcttgagtggattggagatatttaccctggaggcagttatactaattacaatgagaaattcaagggcaaggtcacactgactgcagacacatcctccaggacagcctacatgcagctcagcggcctgacatttgaggactctgccatctactactgtgcaagatcggggtatgactacggtagtgactacgattaccatggtatggactactggggccaagggaccacggtcaccgtctcctca

SEQ ID NO: 1503 - protein, 107 aa, Mus sp.
ELQMTQSPASLSASVGETVTITCRASENIYSNLAWYQQKQGKSPQLLVYAATNLADGVPSRFSGSRSGSDYSLTISSLESEDFVDYYCLQYASYPYTFGGGTKLEIK

SEQ ID NO: 1504 - protein, 11 aa, Mus sp.
RASENIYSNLA

SEQ ID NO: 1505 - protein, 7 aa, Mus sp.
AATNLAD

SEQ ID NO: 1506 - protein, 9 aa, Mus sp.
LQYASYPYT

SEQ ID NO: 1507 - DNA, 321 bp, Mus sp.
gagctccagatgacccagtctccagcctccctatctgcatctgtgggagaaactgtcaccatcacatgtcgagcaagtgagaatatttacagtaatttagcatggtatcagcagaaacagggaaaatctcctcagctcctggtctatgctgcaacaaacttagcagatggtgtgccatcaaggttcagtggcagtaggtctgggtcagattattctctcaccatcagcagccttgagtctgaagattttgtagactattactgtctacaatatgctagttatccgtacacgttcggaggggggaccaagcttgagatcaaa

SEQ ID NO: 1508 - protein, 248 aa, Mus sp.
EVQLLEQSGAELVRPGTSVKISCKATGYTFSNYWISWVKYRPGHGLEWIGDIYPGGSYTNYNEKFKGKVTLTADTSSRTAYMQLSGLTFEDSAIYYCARSGYDYGSDYDYHGMDYWGQGTTVTVSSGGGGSGGGGSGGGGSELQMTQSPASLSASVGETVTITCRASENIYSNLAWYQQKQGKSPQLLVYAATNLADGVPSRFSGSRSGSDYSLTISSLESEDFVDYYCLQYASYPYTFGGGTKLEIK

SEQ ID NO: 1509 - DNA, 744 bp, Mus sp.
gaggtgcagctgctcgagcagtctggagctgagctggtaaggcctgggacttcagtgaagatttcctgcaaggctactgggtacaccttcagtaattactggataagttgggtaaagtataggcctggacatggtcttgagtggattggagatatttaccctggaggcagttatactaattacaatgagaaattcaagggcaaggtcacactgactgcagacacatcctccaggacagcctacatgcagctcagcggcctgacatttgaggactctgccatctactactgtgcaagatcggggtatgactacggtagtgactacgattaccatggtatggactactggggccaagggaccacggtcaccgtctcctcaggtggtggtggttctggcggcggcggctccggtggtggtggttctgagctccagatgacccagtctccagcctccctatctgcatctgtgggagaaactgtcaccatcacatgtcgagcaagtgagaatatttacagtaatttagcatggtatcagcagaaacagggaaaatctcctcagctcctggtctatgctgcaacaaacttagcagatggtgtgccatcaaggttcagtggcagtaggtctgggtcagattattctctcaccatcagcagccttgagtctgaagattttgtagactattactgtctacaatatgctagttatccgtacacgttcggaggggggaccaagcttgagatcaaa

SEQ ID NO: 1510 - protein, 503 aa, Mus sp.
EVQLLEQSGAELVRPGTSVKISCKATGYTFSNYWISWVKYRPGHGLEWIGDIYPGGSYTNYNEKFKGKVTLTADTSSRTAYMQLSGLTFEDSAIYYCARSGYDYGSDYDYHGMDYWGQGTTVTVSSGGGGSGGGGSGGGGSELQMTQSPASLSASVGETVTITCRASENIYSNLAWYQQKQGKSPQLLVYAATNLADGVPSRFSGSRSGSDYSLTISSLESEDFVDYYCLQYASYPYTFGGGTKLEIKSGGGGSEVQLVESGGGLVQPGGSLKLSCAASGFTFNKYAMNWVRQAPGKGLEWVARIRSKYNNYATYYADSVKDRFTISRDDSKNTAYLQMNNLKTEDTAVYYCVRHGNFGNSYISYWAYWGQGTLVTVSSGGGGSGGGGSGGGGSQTVVTQEPSLTVSPGGTVTLTCGSSTGAVTSGNYPNWVQQKPGQAPRGLIGGTKFLAPGTPARFSGSLLGGKAALTLSGVQPEDEAEYYCVLWYSNRWVFGGGTKLTVL

SEQ ID NO: 1511 - DNA, 1509 bp, Mus sp.
gaggtgcagctgctcgagcagtctggagctgagctggtaaggcctgggacttcagtgaagatttcctgcaaggctactgggtacaccttcagtaattactggataagttgggtaaagtataggcctggacatggtcttgagtggattggagatatttaccctggaggcagttatactaattacaatgagaaattcaagggcaaggtcacactgactgcagacacatcctccaggacagcctacatgcagctcagcggcctgacatttgaggactctgccatctactactgtgcaagatcggggtatgactacggtagtgactacgattaccatggtatggactactggggccaagggaccacggtcaccgtctcctcaggtggtggtggttctggcggcggcggctccggtggtggtggttctgagctccagatgacccagtctccagcctccctatctgcatctgtgggagaaactgtcaccatcacatgtcgagcaagtgagaatatttacagtaatttagcatggtatcagcagaaacagggaaaatctcctcagctcctggtctatgctgcaacaaacttagcagatggtgtgccatcaaggttcagtggcagtaggtctgggtcagattattctctcaccatcagcagccttgagtctgaagattttgtagactattactgtctacaatatgctagttatccgtacacgttcggaggggggaccaagcttgagatcaaatccggaggtggtggatccgaggtgcagctggtcgagtctggaggaggattggtgcagcctggagggtcattgaaactctcatgtgcagcctctggattcaccttcaataagtacgccatgaactgggtccgccaggctccaggaaagggtttggaatgggttgctcgcataagaagtaaatataataattatgcaacatattatgccgattcagtgaaagacaggttcaccatctccagagatgattcaaaaaacactgcctatctacaaatgaacaacttgaaaactgaggacactgccgtgtactactgtgtgagacatgggaacttcggtaatagctacatatcctactgggcttactggggccaagggactctggtcaccgtctcctcaggtggtggtggttctggcggcggcggctccggtggtggtggttctcagactgttgtgactcaggaaccttcactcaccgtatcacctggtggaacagtcacactcacttgtggctcctcgactggggctgttacatctggcaactacccaaactgggtccaacaaaaaccaggtcaggcaccccgtggtctaataggtgggactaagttcctcgcccccggtactcctgccagattctcaggctccctgcttggaggcaaggctgccctcaccctctcaggggtacagccagaggatgaggcagaatattactgtgttctatggtacagcaaccgctgggtgttcggtggaggaaccaaactgactgtccta

SEQ ID NO: 1512 - protein, 119 aa, Mus sp.
EVQLLEQSGAELVRPGTSVKVSCKASGYAFTHYLIEWVKQRPGQGLEWIGMINPENTDTTYNEKFRDKAILTVDKSSNTAYMQLSSLTSDDSAVYFCARQEITSDFDFWGQGTTVTVSS

SEQ ID NO: 1513 - protein, 5 aa, Mus sp.
HYLIE

SEQ ID NO: 1514 - protein, 17 aa, Mus sp.
MINPENTDTTYNEKFRD

SEQ ID NO: 1515 - protein, 9 aa, Mus sp.
QEITSDFDF

SEQ ID NO: 1516 - DNA, 357 bp, Mus sp.
gaggtgcagctgctcgagcagtctggagctgagctggtaaggcctgggacttcagtgaaggtgtcctgcaaggcttctggatacgccttcactcattacttaatagagtgggtgaagcagaggcctggacagggccttgagtggattggaatgattaatcctgaaaatactgatactacctacaatgagaagttcagggacaaggcaatactgactgtagacaaatcctccaacactgcctacatgcagctcagcagcctgacttctgatgactctgcggtctatttctgtgcaagacaggagattacgtcggactttgacttctggggccaagggaccacggtcaccgtctcctca

SEQ ID NO: 1517 - protein, 108 aa, Mus sp.
ELVLTQSPTTMAASPGEKITITCSASSSISSNYLHWYQQKPGFSPKLLIYRTSNLASGVPARFSGSGSGTSYSLTIGTMEAEDVATYYCQQGSSIPYTFGGGTKLEIK

SEQ ID NO: 1518 - protein, 12 aa, Mus sp.
SASSSISSNYLH

SEQ ID NO: 1519 - protein, 7 aa, Mus sp.
RTSNLAS

SEQ ID NO: 1520 - protein, 9 aa, Mus sp.
QQGSSIPYT

SEQ ID NO: 1521 - DNA, 324 bp, Mus sp.
gagctcgtgctcacccagtctccaaccaccatggctgcatctcccggggagaagatcactatcacctgcagtgccagctcaagtataagttccaattacttgcattggtatcagcagaagccaggattctcccctaaactcttgatttataggacatccaatctggcttctggagtcccagctcgcttcagtggcagtgggtctgggacctcttactctctcacaattggcaccatggaggctgaagatgttgccacttactactgccagcagggtagtagtataccgtacacgttcggaggggggaccaagcttgagatcaaa

SEQ ID NO: 1522 - protein, 242 aa, Mus sp.
EVQLLEQSGAELVRPGTSVKVSCKASGYAFTHYLIEWVKQRPGQGLEWIGMINPENTDTTYNEKFRDKAILTVDKSSNTAYMQLSSLTSDDSAVYFCARQEITSDFDFWGQGTTVTVSSGGGGSGGGGSGGGGSELVLTQSPTTMAASPGEKITITCSASSSISSNYLHWYQQKPGFSPKLLIYRTSNLASGVPARFSGSGSGTSYSLTIGTMEAEDVATYYCQQGSSIPYTFGGGTKLEIK

SEQ ID NO: 1523 - DNA, 726 bp, Mus sp.
gaggtgcagctgctcgagcagtctggagctgagctggtaaggcctgggacttcagtgaaggtgtcctgcaaggcttctggatacgccttcactcattacttaatagagtgggtgaagcagaggcctggacagggccttgagtggattggaatgattaatcctgaaaatactgatactacctacaatgagaagttcagggacaaggcaatactgactgtagacaaatcctccaacactgcctacatgcagctcagcagcctgacttctgatgactctgcggtctatttctgtgcaagacaggagattacgtcggactttgacttctggggccaagggaccacggtcaccgtctcctcaggtggtggtggttctggcggcggcggctccggtggtggtggttctgagctcgtgctcacccagtctccaaccaccatggctgcatctcccggggagaagatcactatcacctgcagtgccagctcaagtataagttccaattacttgcattggtatcagcagaagccaggattctcccctaaactcttgatttataggacatccaatctggcttctggagtcccagctcgcttcagtggcagtgggtctgggacctcttactctctcacaattggcaccatggaggctgaagatgttgccacttactactgccagcagggtagtagtataccgtacacgttcggaggggggaccaagcttgagatcaaa

SEQ ID NO: 1524 - protein, 497 aa, Mus sp.
EVQLLEQSGAELVRPGTSVKVSCKASGYAFTHYLIEWVKQRPGQGLEWIGMINPENTDTTYNEKFRDKAILTVDKSSNTAYMQLSSLTSDDSAVYFCARQEITSDFDFWGQGTTVTVSSGGGGSGGGGSGGGGSELVLTQSPTTMAASPGEKITITCSASSSISSNYLHWYQQKPGFSPKLLIYRTSNLASGVPARFSGSGSGTSYSLTIGTMEAEDVATYYCQQGSSIPYTFGGGTKLEIKSGGGGSEVQLVESGGGLVQPGGSLKLSCAASGFTFNKYAMNWVRQAPGKGLEWVARIRSKYNNYATYYADSVKDRFTISRDDSKNTAYLQMNNLKTEDTAVYYCVRHGNFGNSYISYWAYWGQGTLVTVSSGGGGSGGGGSGGGGSQTVVTQEPSLTVSPGGTVTLTCGSSTGAVTSGNYPNWVQQKPGQAPRGLIGGTKFLAPGTPARFSGSLLGGKAALTLSGVQPEDEAEYYCVLWYSNRWVFGGGTKLTVL

SEQ ID NO: 1525 - DNA, 1491 bp, Mus sp.
gaggtgcagctgctcgagcagtctggagctgagctggtaaggcctgggacttcagtgaaggtgtcctgcaaggcttctggatacgccttcactcattacttaatagagtgggtgaagcagaggcctggacagggccttgagtggattggaatgattaatcctgaaaatactgatactacctacaatgagaagttcagggacaaggcaatactgactgtagacaaatcctccaacactgcctacatgcagctcagcagcctgacttctgatgactctgcggtctatttctgtgcaagacaggagattacgtcggactttgacttctggggccaagggaccacggtcaccgtctcctcaggtggtggtggttctggcggcggcggctccggtggtggtggttctgagctcgtgctcacccagtctccaaccaccatggctgcatctcccggggagaagatcactatcacctgcagtgccagctcaagtataagttccaattacttgcattggtatcagcagaagccaggattctcccctaaactcttgatttataggacatccaatctggcttctggagtcccagctcgcttcagtggcagtgggtctgggacctcttactctctcacaattggcaccatggaggctgaagatgttgccacttactactgccagcagggtagtagtataccgtacacgttcggaggggggaccaagcttgagatcaaatccggaggtggtggatccgaggtgcagctggtcgagtctggaggaggattggtgcagcctggagggtcattgaaactctcatgtgcagcctctggattcaccttcaataagtacgccatgaactgggtccgccaggctccaggaaagggtttggaatgggttgctcgcataagaagtaaatataataattatgcaacatattatgccgattcagtgaaagacaggttcaccatctccagagatgattcaaaaaacactgcctatctacaaatgaacaacttgaaaactgaggacactgccgtgtactactgtgtgagacatgggaacttcggtaatagctacatatcctactgggcttactggggccaagggactctggtcaccgtctcctcaggtggtggtggttctggcggcggcggctccggtggtggtggttctcagactgttgtgactcaggaaccttcactcaccgtatcacctggtggaacagtcacactcacttgtggctcctcgactggggctgttacatctggcaactacccaaactgggtccaacaaaaaccaggtcaggcaccccgtggtctaataggtgggactaagttcctcgcccccggtactcctgccagattctcaggctccctgcttggaggcaaggctgccctcaccctctcaggggtacagccagaggatgaggcagaatattactgtgttctatggtacagcaaccgctgggtgttcggtggaggaaccaaactgactgtccta

SEQ ID NO: 1526 - protein, 126 aa, Mus sp.
EVQLLEQSGAELVRPGTSVKISCKTTGYTFGYYWISWLKQRPGHGLEWIGDIYPGGGYTNYHEKFKGKVTLTADTSSRTAYMQLSSLTFEDSAIYYCARSGYDYGSDYDYHGMDYWGQGTTVTVSS

SEQ ID NO: 1527 - protein, 5 aa, Mus sp.
YYWIS

SEQ ID NO: 1528 - protein, 17 aa, Mus sp.
DIYPGGGYTNYHEKFKG

SEQ ID NO: 1529 - protein, 16 aa, Mus sp.
SGYDYGSDYDYHGMDY

SEQ ID NO: 1530 - DNA, 378 bp, Mus sp.
gaggtgcagctgctcgagcagtctggagctgagctggttaggcctgggacttcagtgaagatttcctgcaagactactgggtacaccttcggttattactggataagttggttaaagcagaggcctggacatggccttgagtggattggagatatttaccctggaggtggttacactaactaccatgagaaattcaagggcaaggtcacactgactgcagacacatcctccaggacagcctacatgcagctcagcagcctgacatttgaggactctgccatctattactgtgcaagatcgggatatgactacggtagtgactacgattatcatggtatggattactggggccaagggaccacggtcaccgtctcctca

SEQ ID NO: 1531 - protein, 107 aa, Mus sp.
ELVMTQTPSSLSASLGDRVTISCRASQGISNYLNWYQQKPDGSVKLLIYYTSRLHSGVPSRFSGSGSGTDYSLTISNLDQEDIATYFCQQGNTLPWTFGGGTKLEIK

SEQ ID NO: 1532 - protein, 11 aa, Mus sp.
RASQGISNYLN

SEQ ID NO: 1533 - protein, 7 aa, Mus sp.
YTSRLHS

SEQ ID NO: 1534 - protein, 7 aa, Mus sp.
QQGNTLP

SEQ ID NO: 1535 - DNA, 321 bp, Mus sp.
gagctcgtgatgacccagactccatcctccctgtctgcctctctgggagacagagtcaccatcagttgcagggcaagtcagggcattagcaattatttaaactggtatcagcagaaaccagatggatctgttaaactcctgatctactacacatcaagattacactcaggagtcccatcaaggttcagtggcagtgggtctggaacagattattctctcaccattagcaacctggatcaagaagatattgccacttacttttgccaacagggtaatacgcttccgtggacgttcggaggggggaccaagcttgagatcaaa

SEQ ID NO: 1536 - protein, 248 aa, Mus sp.
EVQLLEQSGAELVRPGTSVKISCKTTGYTFGYYWISWLKQRPGHGLEWIGDIYPGGGYTNYHEKFKGKVTLTADTSSRTAYMQLSSLTFEDSAIYYCARSGYDYGSDYDYHGMDYWGQGTTVTVSSGGGGSGGGGSGGGGSELVMTQTPSSLSASLGDRVTISCRASQGISNYLNWYQQKPDGSVKLLIYYTSRLHSGVPSRFSGSGSGTDYSLTISNLDQEDIATYFCQQGNTLPWTFGGGTKLEIK

SEQ ID NO: 1537 - DNA, 744 bp, Mus sp.
gaggtgcagctgctcgagcagtctggagctgagctggttaggcctgggacttcagtgaagatttcctgcaagactactgggtacaccttcggttattactggataagttggttaaagcagaggcctggacatggccttgagtggattggagatatttaccctggaggtggttacactaactaccatgagaaattcaagggcaaggtcacactgactgcagacacatcctccaggacagcctacatgcagctcagcagcctgacatttgaggactctgccatctattactgtgcaagatcgggatatgactacggtagtgactacgattatcatggtatggattactggggccaagggaccacggtcaccgtctcctcaggtggtggtggttctggcggcggcggctccggtggtggtggttctgagctcgtgatgacccagactccatcctccctgtctgcctctctgggagacagagtcaccatcagttgcagggcaagtcagggcattagcaattatttaaactggtatcagcagaaaccagatggatctgttaaactcctgatctactacacatcaagattacactcaggagtcccatcaaggttcagtggcagtgggtctggaacagattattctctcaccattagcaacctggatcaagaagatattgccacttacttttgccaacagggtaatacgcttccgtggacgttcggaggggggaccaagcttgagatcaaa

SEQ ID NO: 1538 - protein, 503 aa, Mus sp.
EVQLLEQSGAELVRPGTSVKISCKTTGYTFGYYWISWLKQRPGHGLEWIGDIYPGGGYTNYHEKFKGKVTLTADTSSRTAYMQLSSLTFEDSAIYYCARSGYDYGSDYDYHGMDYWGQGTTVTVSSGGGGSGGGGSGGGGSELVMTQTPSSLSASLGDRVTISCRASQGISNYLNWYQQKPDGSVKLLIYYTSRLHSGVPSRFSGSGSGTDYSLTISNLDQEDIATYFCQQGNTLPWTFGGGTKLEIKSGGGGSEVQLVESGGGLVQPGGSLKLSCAASGFTFNKYAMNWVRQAPGKGLEWVARIRSKYNNYATYYADSVKDRFTISRDDSKNTAYLQMNNLKTEDTAVYYCVRHGNFGNSYISYWAYWGQGTLVTVSSGGGGSGGGGSGGGGSQTVVTQEPSLTVSPGGTVTLTCGSSTGAVTSGNYPNWVQQKPGQAPRGLIGGTKFLAPGTPARFSGSLLGGKAALTLSGVQPEDEAEYYCVLWYSNRWVFGGGTKLTVL

SEQ ID NO: 1539 - DNA, 1509 bp, Mus sp.
gaggtgcagctgctcgagcagtctggagctgagctggttaggcctgggacttcagtgaagatttcctgcaagactactgggtacaccttcggttattactggataagttggttaaagcagaggcctggacatggccttgagtggattggagatatttaccctggaggtggttacactaactaccatgagaaattcaagggcaaggtcacactgactgcagacacatcctccaggacagcctacatgcagctcagcagcctgacatttgaggactctgccatctattactgtgcaagatcgggatatgactacggtagtgactacgattatcatggtatggattactggggccaagggaccacggtcaccgtctcctcaggtggtggtggttctggcggcggcggctccggtggtggtggttctgagctcgtgatgacccagactccatcctccctgtctgcctctctgggagacagagtcaccatcagttgcagggcaagtcagggcattagcaattatttaaactggtatcagcagaaaccagatggatctgttaaactcctgatctactacacatcaagattacactcaggagtcccatcaaggttcagtggcagtgggtctggaacagattattctctcaccattagcaacctggatcaagaagatattgccacttacttttgccaacagggtaatacgcttccgtggacgttcggaggggggaccaagcttgagatcaaatccggaggtggtggatccgaggtgcagctggtcgagtctggaggaggattggtgcagcctggagggtcattgaaactctcatgtgcagcctctggattcaccttcaataagtacgccatgaactgggtccgccaggctccaggaaagggtttggaatgggttgctcgcataagaagtaaatataataattatgcaacatattatgccgattcagtgaaagacaggttcaccatctccagagatgattcaaaaaacactgcctatctacaaatgaacaacttgaaaactgaggacactgccgtgtactactgtgtgagacatgggaacttcggtaatagctacatatcctactgggcttactggggccaagggactctggtcaccgtctcctcaggtggtggtggttctggcggcggcggctccggtggtggtggttctcagactgttgtgactcaggaaccttcactcaccgtatcacctggtggaacagtcacactcacttgtggctcctcgactggggctgttacatctggcaactacccaaactgggtccaacaaaaaccaggtcaggcaccccgtggtctaataggtgggactaagttcctcgcccccggtactcctgccagattctcaggctccctgcttggaggcaaggctgccctcaccctctcaggggtacagccagaggatgaggcagaatattactgtgttctatggtacagcaaccgctgggtgttcggtggaggaaccaaactgactgtccta

SEQ ID NO: 1540 - protein, 126 aa, Mus sp.
EVQLLEQSGAEVVRPGTSVKMSCKAAGYTFTKYWIGWVKQRPGHGLEWIGDIHPGGGFANYNEKFKGKATLTADTSSSTAYMQLSRLTSDDSAIYYCARSGYDYGSSYDYHGMDYWGQGTTVTVSS

SEQ ID NO: 1541 - protein, 5 aa, Mus sp.
KYWIG

SEQ ID NO: 1542 - protein, 17 aa, Mus sp.
DIHPGGGFANYNEKFKG

SEQ ID NO: 1543 - protein, 16 aa, Mus sp.
SGYDYGSSYDYHGMDY

SEQ ID NO: 1544 - DNA, 378 bp, Mus sp.
gaggtgcagctgctcgagcagtctggagctgaggtggttaggcctgggacttcagtgaagatgtcctgcaaggctgctggatacaccttcactaagtactggataggttgggtaaagcagaggcctggacatggccttgagtggattggagatattcaccctggaggtggttttgctaactacaatgagaagttcaagggcaaggccacactgactgcagacacatcctccagcacagcctacatgcagctcagcagactgacatctgatgactctgccatctattactgtgcaagatcgggttatgactacggtagtagttacgattaccatggtatggactactggggccaagggaccacggtcaccgtctcctca

SEQ ID NO: 1545 - protein, 107 aa, Mus sp.
ELVMTQSPSSLSASLGERVSLTCRASQEISGYLSWLQQKPDGTIKRLIYAASTLDSGVPKRFSGSRSGSDYSLTISSLESEDFADYYCLQYASYPPTFGGGTKLEIK

SEQ ID NO: 1546 - protein, 11 aa, Mus sp.
RASQEISGYLS

SEQ ID NO: 1547 - protein, 7 aa, Mus sp.
AASTLDS

SEQ ID NO: 1548 - protein, 9 aa, Mus sp.
LQYASYPPT

SEQ ID NO: 1549 - DNA, 321 bp, Mus sp.
gagctcgtgatgacacagtctccatcctccttatctgcctctctgggagaaagagtcagtctcacttgtcgggcaagtcaggaaattagtggttacttaagctggcttcagcagaaaccagatggaactattaaacgcctgatctacgccgcatccactttagattctggtgtcccaaaaaggttcagtggcagtaggtctgggtcagattattctctcaccatcagcagccttgagtctgaagattttgcagactattactgtctacaatatgctagttatcctcccacgttcggaggggggaccaagcttgagatcaaa

SEQ ID NO: 1550 - protein, 248 aa, Mus sp.
EVQLLEQSGAEVVRPGTSVKMSCKAAGYTFTKYWIGWVKQRPGHGLEWIGDIHPGGGFANYNEKFKGKATLTADTSSSTAYMQLSRLTSDDSAIYYCARSGYDYGSSYDYHGMDYWGQGTTVTVSSGGGGSGGGGSGGGGSELVMTQSPSSLSASLGERVSLTCRASQEISGYLSWLQQKPDGTIKRLIYAASTLDSGVPKRFSGSRSGSDYSLTISSLESEDFADYYCLQYASYPPTFGGGTKLEIK

SEQ ID NO: 1551 - DNA, 744 bp, Mus sp.
gaggtgcagctgctcgagcagtctggagctgaggtggttaggcctgggacttcagtgaagatgtcctgcaaggctgctggatacaccttcactaagtactggataggttgggtaaagcagaggcctggacatggccttgagtggattggagatattcaccctggaggtggttttgctaactacaatgagaagttcaagggcaaggccacactgactgcagacacatcctccagcacagcctacatgcagctcagcagactgacatctgatgactctgccatctattactgtgcaagatcgggttatgactacggtagtagttacgattaccatggtatggactactggggccaagggaccacggtcaccgtctcctcaggtggtggtggttctggcggcggcggctccggtggtggtggttctgagctcgtgatgacacagtctccatcctccttatctgcctctctgggagaaagagtcagtctcacttgtcgggcaagtcaggaaattagtggttacttaagctggcttcagcagaaaccagatggaactattaaacgcctgatctacgccgcatccactttagattctggtgtcccaaaaaggttcagtggcagtaggtctgggtcagattattctctcaccatcagcagccttgagtctgaagattttgcagactattactgtctacaatatgctagttatcctcccacgttcggaggggggaccaagcttgagatcaaa

SEQ ID NO: 1552 - protein, 503 aa, Mus sp.
EVQLLEQSGAEVVRPGTSVKMSCKAAGYTFTKYWIGWVKQRPGHGLEWIGDIHPGGGFANYNEKFKGKATLTADTSSSTAYMQLSRLTSDDSAIYYCARSGYDYGSSYDYHGMDYWGQGTTVTVSSGGGGSGGGGSGGGGSELVMTQSPSSLSASLGERVSLTCRASQEISGYLSWLQQKPDGTIKRLIYAASTLDSGVPKRFSGSRSGSDYSLTISSLESEDFADYYCLQYASYPPTFGGGTKLEIKSGGGGSEVQLVESGGGLVQPGGSLKLSCAASGFTFNKYAMNWVRQAPGKGLEWVARIRSKYNNYATYYADSVKDRFTISRDDSKNTAYLQMNNLKTEDTAVYYCVRHGNFGNSYISYWAYWGQGTLVTVSSGGGGSGGGGSGGGGSQTVVTQEPSLTVSPGGTVTLTCGSSTGAVTSGNYPNWVQQKPGQAPRGLIGGTKFLAPGTPARFSGSLLGGKAALTLSGVQPEDEAEYYCVLWYSNRWVFGGGTKLTVL

SEQ ID NO: 1553 - DNA, 1509 bp, Mus sp.
gaggtgcagctgctcgagcagtctggagctgaggtggttaggcctgggacttcagtgaagatgtcctgcaaggctgctggatacaccttcactaagtactggataggttgggtaaagcagaggcctggacatggccttgagtggattggagatattcaccctggaggtggttttgctaactacaatgagaagttcaagggcaaggccacactgactgcagacacatcctccagcacagcctacatgcagctcagcagactgacatctgatgactctgccatctattactgtgcaagatcgggttatgactacggtagtagttacgattaccatggtatggactactggggccaagggaccacggtcaccgtctcctcaggtggtggtggttctggcggcggcggctccggtggtggtggttctgagctcgtgatgacacagtctccatcctccttatctgcctctctgggagaaagagtcagtctcacttgtcgggcaagtcaggaaattagtggttacttaagctggcttcagcagaaaccagatggaactattaaacgcctgatctacgccgcatccactttagattctggtgtcccaaaaaggttcagtggcagtaggtctgggtcagattattctctcaccatcagcagccttgagtctgaagattttgcagactattactgtctacaatatgctagttatcctcccacgttcggaggggggaccaagcttgagatcaaatccggaggtggtggatccgaggtgcagctggtcgagtctggaggaggattggtgcagcctggagggtcattgaaactctcatgtgcagcctctggattcaccttcaataagtacgccatgaactgggtccgccaggctccaggaaagggtttggaatgggttgctcgcataagaagtaaatataataattatgcaacatattatgccgattcagtgaaagacaggttcaccatctccagagatgattcaaaaaacactgcctatctacaaatgaacaacttgaaaactgaggacactgccgtgtactactgtgtgagacatgggaacttcggtaatagctacatatcctactgggcttactggggccaagggactctggtcaccgtctcctcaggtggtggtggttctggcggcggcggctccggtggtggtggttctcagactgttgtgactcaggaaccttcactcaccgtatcacctggtggaacagtcacactcacttgtggctcctcgactggggctgttacatctggcaactacccaaactgggtccaacaaaaaccaggtcaggcaccccgtggtctaataggtgggactaagttcctcgcccccggtactcctgccagattctcaggctccctgcttggaggcaaggctgccctcaccctctcaggggtacagccagaggatgaggcagaatattactgtgttctatggtacagcaaccgctgggtgttcggtggaggaaccaaactgactgtccta

SEQ ID NO: 1554 - protein, 126 aa, Mus sp.
EVQLLEQSGAELVRPGTSVKIPCKATGYTFSYYWIGWVKQRPGHGLEWIGDIYPGGGYSNYNEKFKGKATLTADTSSSTAYMQLSGLTSEDSAIYYCARSGYDYGSDYDYHGLDYWGQGTTVTVSS

SEQ ID NO: 1555 - protein, 5 aa, Mus sp.
YYWIG

SEQ ID NO: 1556 - protein, 17 aa, Mus sp.
DIYPGGGYSNYNEKFKG

SEQ ID NO: 1557 - protein, 16 aa, Mus sp.
SGYDYGSDYDYHGLDY

SEQ ID NO: 1558 - DNA, 378 bp, Mus sp.
gaggtgcagctgctcgagcagtctggagctgaactggtaaggcctgggacttcagtgaagattccctgcaaggctactggatacaccttcagttattactggataggttgggtaaagcagaggcctggacatggccttgagtggattggagatatttaccctggaggtggttatagtaactacaatgagaaattcaagggaaaggccacactgactgcagacacatcctccagcacagcctacatgcagctcagcggcctgacatctgaggactctgccatctattactgtgcaagatcgggatatgactacggtagtgactacgattaccatggtctggactactggggccaagggaccacggtcaccgtctcctca

SEQ ID NO: 1559 - protein, 111 aa, Mus sp.
ELVLTQSPASLAVSLGQRATISCRASESVEYYGTSLMQWYQQKPGQPPKLLIYAASNVESGVPARFSGSGSGTDFSLNIHPVEEDDIAMYFCQQSRKVPYTFGGGTKLEIK

SEQ ID NO: 1560 - protein, 15 aa, Mus sp.
RASESVEYYGTSLMQ

SEQ ID NO: 1561 - protein, 7 aa, Mus sp.
AASNVES

SEQ ID NO: 1562 - protein, 9 aa, Mus sp.
QQSRKVPYT

SEQ ID NO: 1563 - DNA, 333 bp, Mus sp.
gagctcgtgctcacccagtctccagcttctttggctgtgtctctagggcagagagccaccatctcctgcagagccagtgaaagtgttgaatattatggcacaagtttaatgcagtggtaccaacagaaaccaggacagccacccaaactcctcatctatgctgcatccaacgtagaatctggggtccctgccaggtttagtggcagtgggtctgggacagacttcagcctcaacatccatcctgtggaggaggatgatattgcaatgtatttctgtcagcaaagtaggaaggttccgtacacgttcggaggggggaccaagcttgagatcaaa

SEQ ID NO: 1564 - protein, 252 aa, Mus sp.
EVQLLEQSGAELVRPGTSVKIPCKATGYTFSYYWIGWVKQRPGHGLEWIGDIYPGGGYSNYNEKFKGKATLTADTSSSTAYMQLSGLTSEDSAIYYCARSGYDYGSDYDYHGLDYWGQGTTVTVSSGGGGSGGGGSGGGGSELVLTQSPASLAVSLGQRATISCRASESVEYYGTSLMQWYQQKPGQPPKLLIYAASNVESGVPARFSGSGSGTDFSLNIHPVEEDDIAMYFCQQSRKVPYTFGGGTKLEIK

SEQ ID NO: 1565 - DNA, 756 bp, Mus sp.
gaggtgcagctgctcgagcagtctggagctgaactggtaaggcctgggacttcagtgaagattccctgcaaggctactggatacaccttcagttattactggataggttgggtaaagcagaggcctggacatggccttgagtggattggagatatttaccctggaggtggttatagtaactacaatgagaaattcaagggaaaggccacactgactgcagacacatcctccagcacagcctacatgcagctcagcggcctgacatctgaggactctgccatctattactgtgcaagatcgggatatgactacggtagtgactacgattaccatggtctggactactggggccaagggaccacggtcaccgtctcctcaggtggtggtggttctggcggcggcggctccggtggtggtggttctgagctcgtgctcacccagtctccagcttctttggctgtgtctctagggcagagagccaccatctcctgcagagccagtgaaagtgttgaatattatggcacaagtttaatgcagtggtaccaacagaaaccaggacagccacccaaactcctcatctatgctgcatccaacgtagaatctggggtccctgccaggtttagtggcagtgggtctgggacagacttcagcctcaacatccatcctgtggaggaggatgatattgcaatgtatttctgtcagcaaagtaggaaggttccgtacacgttcggaggggggaccaagcttgagatcaaa

SEQ ID NO: 1566 - protein, 507 aa, Mus sp.
EVQLLEQSGAELVRPGTSVKIPCKATGYTFSYYWIGWVKQRPGHGLEWIGDIYPGGGYSNYNEKFKGKATLTADTSSSTAYMQLSGLTSEDSAIYYCARSGYDYGSDYDYHGLDYWGQGTTVTVSSGGGGSGGGGSGGGGSELVLTQSPASLAVSLGQRATISCRASESVEYYGTSLMQWYQQKPGQPPKLLIYAASNVESGVPARFSGSGSGTDFSLNIHPVEEDDIAMYFCQQSRKVPYTFGGGTKLEIKSGGGGSEVQLVESGGGLVQPGGSLKLSCAASGFTFNKYAMNWVRQAPGKGLEWVARIRSKYNNYATYYADSVKDRFTISRDDSKNTAYLQMNNLKTEDTAVYYCVRHGNFGNSYISYWAYWGQGTLVTVSSGGGGSGGGGSGGGGSQTVVTQEPSLTVSPGGTVTLTCGSSTGAVTSGNYPNWVQQKPGQAPRGLIGGTKFLAPGTPARFSGSLLGGKAALTLSGVQPEDEAEYYCVLWYSNRWVFGGGTKLTVL

SEQ ID NO: 1567 - DNA, 1521 bp, Mus sp.
gaggtgcagctgctcgagcagtctggagctgaactggtaaggcctgggacttcagtgaagattccctgcaaggctactggatacaccttcagttattactggataggttgggtaaagcagaggcctggacatggccttgagtggattggagatatttaccctggaggtggttatagtaactacaatgagaaattcaagggaaaggccacactgactgcagacacatcctccagcacagcctacatgcagctcagcggcctgacatctgaggactctgccatctattactgtgcaagatcgggatatgactacggtagtgactacgattaccatggtctggactactggggccaagggaccacggtcaccgtctcctcaggtggtggtggttctggcggcggcggctccggtggtggtggttctgagctcgtgctcacccagtctccagcttctttggctgtgtctctagggcagagagccaccatctcctgcagagccagtgaaagtgttgaatattatggcacaagtttaatgcagtggtaccaacagaaaccaggacagccacccaaactcctcatctatgctgcatccaacgtagaatctggggtccctgccaggtttagtggcagtgggtctgggacagacttcagcctcaacatccatcctgtggaggaggatgatattgcaatgtatttctgtcagcaaagtaggaaggttccgtacacgttcggaggggggaccaagcttgagatcaaatccggaggtggtggatccgaggtgcagctggtcgagtctggaggaggattggtgcagcctggagggtcattgaaactctcatgtgcagcctctggattcaccttcaataagtacgccatgaactgggtccgccaggctccaggaaagggtttggaatgggttgctcgcataagaagtaaatataataattatgcaacatattatgccgattcagtgaaagacaggttcaccatctccagagatgattcaaaaaacactgcctatctacaaatgaacaacttgaaaactgaggacactgccgtgtactactgtgtgagacatgggaacttcggtaatagctacatatcctactgggcttactggggccaagggactctggtcaccgtctcctcaggtggtggtggttctggcggcggcggctccggtggtggtggttctcagactgttgtgactcaggaaccttcactcaccgtatcacctggtggaacagtcacactcacttgtggctcctcgactggggctgttacatctggcaactacccaaactgggtccaacaaaaaccaggtcaggcaccccgtggtctaataggtgggactaagttcctcgcccccggtactcctgccagattctcaggctccctgcttggaggcaaggctgccctcaccctctcaggggtacagccagaggatgaggcagaatattactgtgttctatggtacagcaaccgctgggtgttcggtggaggaaccaaactgactgtccta

SEQ ID NO: 1568 - protein, 126 aa, Mus sp.; identical to SEQ ID NO: 1540

SEQ ID NO: 1569 - protein, 5 aa, Mus sp.
KYWIG

SEQ ID NO: 1570 - protein, 17 aa, Mus sp.
DIHPGGGFANYNEKFKG

SEQ ID NO: 1571 - protein, 16 aa, Mus sp.
SGYDYGSSYDYHGMDY

SEQ ID NO: 1572 - DNA, 378 bp, Mus sp.; identical to SEQ ID NO: 1544

SEQ ID NO: 1573 - protein, 111 aa, Mus sp.
ELQMTQSPTSLAVSLGQRATISCRASQTVYYDGNNYMNWYQHKPGQPPKLLIYATSNLESGIPARFSGSGSGTDFTLNIHPVEAEDAATYYCQQSYEDPYTFGGGTKLEIK

SEQ ID NO: 1574 - protein, 15 aa, Mus sp.
RASQTVYYDGNNYMN

SEQ ID NO: 1575 - protein, 7 aa, Mus sp.
ATSNLES

SEQ ID NO: 1576 - protein, 9 aa, Mus sp.
QQSYEDPYT

SEQ ID NO: 1577 - DNA, 333 bp, Mus sp.
gagctccagatgacccagtctccaacttctttggctgtgtctctcgggcagagggccaccatctcctgcagggccagccaaactgtttactatgatggtaataattatatgaactggtatcaacacaaaccaggacagccacccaaactcctcatctatgctacatccaatctagaatctgggatcccagccaggtttagtggcagtgggtctgggacagacttcaccctcaacatccatcctgtggaggcggaggatgctgcaacctattactgtcagcaaagttatgaggatccgtacacgttcggaggggggaccaagcttgagatcaaa

SEQ ID NO: 1578 - protein, 252 aa, Mus sp.
EVQLLEQSGAEVVRPGTSVKMSCKAAGYTFTKYWIGWVKQRPGHGLEWIGDIHPGGGFANYNEKFKGKATLTADTSSSTAYMQLSRLTSDDSAIYYCARSGYDYGSSYDYHGMDYWGQGTTVTVSSGGGGSGGGGSGGGGSELQMTQSPTSLAVSLGQRATISCRASQTVYYDGNNYMNWYQHKPGQPPKLLIYATSNLESGIPARFSGSGSGTDFTLNIHPVEAEDAATYYCQQSYEDPYTFGGGTKLEIK

SEQ ID NO: 1579 - DNA, 756 bp, Mus sp.
gaggtgcagctgctcgagcagtctggagctgaggtggttaggcctgggacttcagtgaagatgtcctgcaaggctgctggatacaccttcactaagtactggataggttgggtaaagcagaggcctggacatggccttgagtggattggagatattcaccctggaggtggttttgctaactacaatgagaagttcaagggcaaggccacactgactgcagacacatcctccagcacagcctacatgcagctcagcagactgacatctgatgactctgccatctattactgtgcaagatcgggttatgactacggtagtagttacgattaccatggtatggactactggggccaagggaccacggtcaccgtctcctcaggtggtggtggttctggcggcggcggctccggtggtggtggttctgagctccagatgacccagtctccaacttctttggctgtgtctctcgggcagagggccaccatctcctgcagggccagccaaactgtttactatgatggtaataattatatgaactggtatcaacacaaaccaggacagccacccaaactcctcatctatgctacatccaatctagaatctgggatcccagccaggtttagtggcagtgggtctgggacagacttcaccctcaacatccatcctgtggaggcggaggatgctgcaacctattactgtcagcaaagttatgaggatccgtacacgttcggaggggggaccaagcttgagatcaaa

SEQ ID NO: 1580 - protein, 507 aa, Mus sp.
EVQLLEQSGAEVVRPGTSVKMSCKAAGYTFTKYWIGWVKQRPGHGLEWIGDIHPGGGFANYNEKFKGKATLTADTSSSTAYMQLSRLTSDDSAIYYCARSGYDYGSSYDYHGMDYWGQGTTVTVSSGGGGSGGGGSGGGGSELQMTQSPTSLAVSLGQRATISCRASQTVYYDGNNYMNWYQHKPGQPPKLLIYATSNLESGIPARFSGSGSGTDFTLNIHPVEAEDAATYYCQQSYEDPYTFGGGTKLEIKSGGGGSEVQLVESGGGLVQPGGSLKLSCAASGFTFNKYAMNWVRQAPGKGLEWVARIRSKYNNYATYYADSVKDRFTISRDDSKNTAYLQMNNLKTEDTAVYYCVRHGNFGNSYISYWAYWGQGTLVTVSSGGGGSGGGGSGGGGSQTVVTQEPSLTVSPGGTVTLTCGSSTGAVTSGNYPNWVQQKPGQAPRGLIGGTKFLAPGTPARFSGSLLGGKAALTLSGVQPEDEAEYYCVLWYSNRWVFGGGTKLTVL

SEQ ID NO: 1581 - DNA, 1521 bp, Mus sp.
gaggtgcagctgctcgagcagtctggagctgaggtggttaggcctgggacttcagtgaagatgtcctgcaaggctgctggatacaccttcactaagtactggataggttgggtaaagcagaggcctggacatggccttgagtggattggagatattcaccctggaggtggttttgctaactacaatgagaagttcaagggcaaggccacactgactgcagacacatcctccagcacagcctacatgcagctcagcagactgacatctgatgactctgccatctattactgtgcaagatcgggttatgactacggtagtagttacgattaccatggtatggactactggggccaagggaccacggtcaccgtctcctcaggtggtggtggttctggcggcggcggctccggtggtggtggttctgagctccagatgacccagtctccaacttctttggctgtgtctctcgggcagagggccaccatctcctgcagggccagccaaactgtttactatgatggtaataattatatgaactggtatcaacacaaaccaggacagccacccaaactcctcatctatgctacatccaatctagaatctgggatcccagccaggtttagtggcagtgggtctgggacagacttcaccctcaacatccatcctgtggaggcggaggatgctgcaacctattactgtcagcaaagttatgaggatccgtacacgttcggaggggggaccaagcttgagatcaaatccggaggtggtggatccgaggtgcagctggtcgagtctggaggaggattggtgcagcctggagggtcattgaaactctcatgtgcagcctctggattcaccttcaataagtacgccatgaactgggtccgccaggctccaggaaagggtttggaatgggttgctcgcataagaagtaaatataataattatgcaacatattatgccgattcagtgaaagacaggttcaccatctccagagatgattcaaaaaacactgcctatctacaaatgaacaacttgaaaactgaggacactgccgtgtactactgtgtgagacatgggaacttcggtaatagctacatatcctactgggcttactggggccaagggactctggtcaccgtctcctcaggtggtggtggttctggcggcggcggctccggtggtggtggttctcagactgttgtgactcaggaaccttcactcaccgtatcacctggtggaacagtcacactcacttgtggctcctcgactggggctgttacatctggcaactacccaaactgggtccaacaaaaaccaggtcaggcaccccgtggtctaataggtgggactaagttcctcgcccccggtactcctgccagattctcaggctccctgcttggaggcaaggctgccctcaccctctcaggggtacagccagaggatgaggcagaatattactgtgttctatggtacagcaaccgctgggtgttcggtggaggaaccaaactgactgtccta

SEQ ID NO: 1582 - protein, 126 aa, Mus sp.
EVQLLEQSGAELVRPGTSVKISCKATGYTFTTYWLGWVKQRPGHGLEWIGEIHPGGGYTNYNEKFKGKATLTADTSSSTAYMQLSRLTSDDSAIYYCARSGYDYGSSYDYYGMDYWGQGTTVTVSS

SEQ ID NO: 1583 - protein, 5 aa, Mus sp.
TYWLG

SEQ ID NO: 1584 - protein, 17 aa, Mus sp.
EIHPGGGYTNYNEKFKG

SEQ ID NO: 1585 - protein, 16 aa, Mus sp.
SGYDYGSSYDYYGMDY

SEQ ID NO: 1586 - DNA, 378 bp, Mus sp.
gaggtgcagctgctcgagcagtctggagctgaactggtaaggcctgggacctcagtgaagatttcctgcaaggctactggatacaccttcactacttactggctaggttgggtaaagcagaggcctggacatggccttgagtggattggagagattcaccctggaggtggttatactaactacaatgagaagttcaagggcaaggccacactgactgcagacacatcctccagcacagcctacatgcagctcagcagactgacatctgatgactccgccatctattactgtgcaagatcggggtatgactacggtagtagttacgattactatggtatggactactggggccaagggaccacggtcaccgtctcctca

SEQ ID NO: 1587 - protein, 107 aa, Mus sp.
ELVMTQSPSSLSASLGERVSLTCRASQDIGSSLNWLQQEPDGTIKRLIYATSSLDSGVPKRFSGSRSGSDYSLTISSLESEDFVDYYCLQYASSPYTFGGGTKLEIK

SEQ ID NO: 1588 - protein, 11 aa, Mus sp.
RASQDIGSSLN

SEQ ID NO: 1589 - protein, 7 aa, Mus sp.
ATSSLDS

SEQ ID NO: 1590 - protein, 9 aa, Mus sp.
LQYASSPYT

SEQ ID NO: 1591 - DNA, 321 bp, Mus sp.
gagctcgtcatgacccagtctccatcctccttatctgcctctctgggagaaagagtcagtctcacttgtcgggcaagtcaggacattggtagtagcttaaactggcttcagcaggaaccagatggaactattaaacgcctgatctacgccacatccagtttagattctggtgtccccaaaaggttcagtggcagtaggtctgggtcagattattctctcaccatcagcagccttgagtctgaagattttgtagactattactgtctacaatatgctagttctccgtacacgttcggaggggggaccaagcttgagatcaaa

SEQ ID NO: 1592 - protein, 248 aa, Mus sp.
EVQLLEQSGAELVRPGTSVKISCKATGYTFTTYWLGWVKQRPGHGLEWIGEIHPGGGYTNYNEKFKGKATLTADTSSSTAYMQLSRLTSDDSAIYYCARSGYDYGSSYDYYGMDYWGQGTTVTVSSGGGGSGGGGSGGGGSELVMTQSPSSLSASLGERVSLTCRASQDIGSSLNWLQQEPDGTIKRLIYATSSLDSGVPKRFSGSRSGSDYSLTISSLESEDFVDYYCLQYASSPYTFGGGTKLEIK

SEQ ID NO: 1593 - DNA, 744 bp, Mus sp.
gaggtgcagctgctcgagcagtctggagctgaactggtaaggcctgggacctcagtgaagatttcctgcaaggctactggatacaccttcactacttactggctaggttgggtaaagcagaggcctggacatggccttgagtggattggagagattcaccctggaggtggttatactaactacaatgagaagttcaagggcaaggccacactgactgcagacacatcctccagcacagcctacatgcagctcagcagactgacatctgatgactccgccatctattactgtgcaagatcggggtatgactacggtagtagttacgattactatggtatggactactggggccaagggaccacggtcaccgtctcctcaggtggtggtggttctggcggcggcggctccggtggtggtggttctgagctcgtcatgacccagtctccatcctccttatctgcctctctgggagaaagagtcagtctcacttgtcgggcaagtcaggacattggtagtagcttaaactggcttcagcaggaaccagatggaactattaaacgcctgatctacgccacatccagtttagattctggtgtccccaaaaggttcagtggcagtaggtctgggtcagattattctctcaccatcagcagccttgagtctgaagattttgtagactattactgtctacaatatgctagttctccgtacacgttcggaggggggaccaagcttgagatcaaa

SEQ ID NO: 1594 - protein, 503 aa, Mus sp.
EVQLLEQSGAELVRPGTSVKISCKATGYTFTTYWLGWVKQRPGHGLEWIGEIHPGGGYTNYNEKFKGKATLTADTSSSTAYMQLSRLTSDDSAIYYCARSGYDYGSSYDYYGMDYWGQGTTVTVSSGGGGSGGGGSGGGGSELVMTQSPSSLSASLGERVSLTCRASQDIGSSLNWLQQEPDGTIKRLIYATSSLDSGVPKRFSGSRSGSDYSLTISSLESEDFVDYYCLQYASSPYTFGGGTKLEIKSGGGGSEVQLVESGGGLVQPGGSLKLSCAASGFTFNKYAMNWVRQAPGKGLEWVARIRSKYNNYATYYADSVKDRFTISRDDSKNTAYLQMNNLKTEDTAVYYCVRHGNFGNSYISYWAYWGQGTLVTVSSGGGGSGGGGSGGGGSQTVVTQEPSLTVSPGGTVTLTCGSSTGAVTSGNYPNWVQQKPGQAPRGLIGGTKFLAPGTPARFSGSLLGGKAALTLSGVQPEDEAEYYCVLWYSNRWVFGGGTKLTVL

SEQ ID NO: 1595 - DNA, 1509 bp, Mus sp.
gaggtgcagctgctcgagcagtctggagctgaactggtaaggcctgggacctcagtgaagatttcctgcaaggctactggatacaccttcactacttactggctaggttgggtaaagcagaggcctggacatggccttgagtggattggagagattcaccctggaggtggttatactaactacaatgagaagttcaagggcaaggccacactgactgcagacacatcctccagcacagcctacatgcagctcagcagactgacatctgatgactccgccatctattactgtgcaagatcggggtatgactacggtagtagttacgattactatggtatggactactggggccaagggaccacggtcaccgtctcctcaggtggtggtggttctggcggcggcggctccggtggtggtggttctgagctcgtcatgacccagtctccatcctccttatctgcctctctgggagaaagagtcagtctcacttgtcgggcaagtcaggacattggtagtagcttaaactggcttcagcaggaaccagatggaactattaaacgcctgatctacgccacatccagtttagattctggtgtccccaaaaggttcagtggcagtaggtctgggtcagattattctctcaccatcagcagccttgagtctgaagattttgtagactattactgtctacaatatgctagttctccgtacacgttcggaggggggaccaagcttgagatcaaatccggaggtggtggatccgaggtgcagctggtcgagtctggaggaggattggtgcagcctggagggtcattgaaactctcatgtgcagcctctggattcaccttcaataagtacgccatgaactgggtccgccaggctccaggaaagggtttggaatgggttgctcgcataagaagtaaatataataattatgcaacatattatgccgattcagtgaaagacaggttcaccatctccagagatgattcaaaaaacactgcctatctacaaatgaacaacttgaaaactgaggacactgccgtgtactactgtgtgagacatgggaacttcggtaatagctacatatcctactgggcttactggggccaagggactctggtcaccgtctcctcaggtggtggtggttctggcggcggcggctccggtggtggtggttctcagactgttgtgactcaggaaccttcactcaccgtatcacctggtggaacagtcacactcacttgtggctcctcgactggggctgttacatctggcaactacccaaactgggtccaacaaaaaccaggtcaggcaccccgtggtctaataggtgggactaagttcctcgcccccggtactcctgccagattctcaggctccctgcttggaggcaaggctgccctcaccctctcaggggtacagccagaggatgaggcagaatattactgtgttctatggtacagcaaccgctgggtgttcggtggaggaaccaaactgactgtccta

SEQ ID NO: 1596 - protein, 126 aa, Mus sp.; identical to SEQ ID NO: 1540

SEQ ID NO: 1597 - protein, 5 aa, Mus sp.
KYWIG

SEQ ID NO: 1598 - protein, 17 aa, Mus sp.
DIHPGGGFANYNEKFKG

SEQ ID NO: 1599 - protein, 16 aa, Mus sp.
SGYDYGSSYDYHGMDY

SEQ ID NO: 1600 - DNA, 378 bp, Mus sp.; identical to SEQ ID NO: 1544

SEQ ID NO: 1601 - protein, 113 aa, Mus sp.
ELVMTQSPSSLTVTAGEKVTMSCKSSQSLLNSGNQKNYLAWYQQKPGQPPKLLIYGASTRESGVPDRFTGSGSGTDFTLTISSVQAEDLADYFCQQHYSTPYTFGGGTKLEIK

SEQ ID NO: 1602 - protein, 17 aa, Mus sp.
KSSQSLLNSGNQKNYLA

SEQ ID NO: 1603 - protein, 7 aa, Mus sp.
GASTRES

SEQ ID NO: 1604 - protein, 9 aa, Mus sp.
QQHYSTPYT

SEQ ID NO: 1605 - DNA, 339 bp, Mus sp.
gagctcgtgatgacacagtctccatcctccctgactgtgacagcaggagagaaggtcactatgagctgcaagtccagtcagagtctgttaaacagtggaaatcaaaagaactacttggcctggtaccagcagaaaccagggcagcctcctaaactgttgatctacggggcatccactagggaatctggagtccctgatcgcttcacaggcagtggatctgggacagatttcactcttaccatcagcagtgtgcaggctgaagacctggcagattacttctgtcagcaacattatagcactccgtacacgttcggaggggggaccaagcttgagatcaaa

SEQ ID NO: 1606 - protein, 254 aa, Mus sp.
EVQLLEQSGAEVVRPGTSVKMSCKAAGYTFTKYWIGWVKQRPGHGLEWIGDIHPGGGFANYNEKFKGKATLTADTSSSTAYMQLSRLTSDDSAIYYCARSGYDYGSSYDYHGMDYWGQGTTVTVSSGGGGSGGGGSGGGGSELVMTQSPSSLTVTAGEKVTMSCKSSQSLLNSGNQKNYLAWYQQKPGQPPKLLIYGASTRESGVPDRFTGSGSGTDFTLTISSVQAEDLADYFCQQHYSTPYTFGGGTKLEIK

SEQ ID NO: 1607 - DNA, 762 bp, Mus sp.
gaggtgcagctgctcgagcagtctggagctgaggtggttaggcctgggacttcagtgaagatgtcctgcaaggctgctggatacaccttcactaagtactggataggttgggtaaagcagaggcctggacatggccttgagtggattggagatattcaccctggaggtggttttgctaactacaatgagaagttcaagggcaaggccacactgactgcagacacatcctccagcacagcctacatgcagctcagcagactgacatctgatgactctgccatctattactgtgcaagatcgggttatgactacggtagtagttacgattaccatggtatggactactggggccaagggaccacggtcaccgtctcctcaggtggtggtggttctggcggcggcggctccggtggtggtggttctgagctcgtgatgacacagtctccatcctccctgactgtgacagcaggagagaaggtcactatgagctgcaagtccagtcagagtctgttaaacagtggaaatcaaaagaactacttggcctggtaccagcagaaaccagggcagcctcctaaactgttgatctacggggcatccactagggaatctggagtccctgatcgcttcacaggcagtggatctgggacagatttcactcttaccatcagcagtgtgcaggctgaagacctggcagattacttctgtcagcaacattatagcactccgtacacgttcggaggggggaccaagcttgagatcaaa

SEQ ID NO: 1608 - protein, 509 aa, Mus sp.
EVQLLEQSGAEVVRPGTSVKMSCKAAGYTFTKYWIGWVKQRPGHGLEWIGDIHPGGGFANYNEKFKGKATLTADTSSSTAYMQLSRLTSDDSAIYYCARSGYDYGSSYDYHGMDYWGQGTTVTVSSGGGGSGGGGSGGGGSELVMTQSPSSLTVTAGEKVTMSCKSSQSLLNSGNQKNYLAWYQQKPGQPPKLLIYGASTRESGVPDRFTGSGSGTDFTLTISSVQAEDLADYFCQQHYSTPYTFGGGTKLEIKSGGGGSEVQLVESGGGLVQPGGSLKLSCAASGFTFNKYAMNWVRQAPGKGLEWVARIRSKYNNYATYYADSVKDRFTISRDDSKNTAYLQMNNLKTEDTAVYYCVRHGNFGNSYISYWAYWGQGTLVTVSSGGGGSGGGGSGGGGSQTVVTQEPSLTVSPGGTVTLTCGSSTGAVTSGNYPNWVQQKPGQAPRGLIGGTKFLAPGTPARFSGSLLGGKAALTLSGVQPEDEAEYYCVLWYSNRWVFGGGTKLTVL

SEQ ID NO: 1609 - DNA, 1527 bp, Mus sp.
gaggtgcagctgctcgagcagtctggagctgaggtggttaggcctgggacttcagtgaagatgtcctgcaaggctgctggatacaccttcactaagtactggataggttgggtaaagcagaggcctggacatggccttgagtggattggagatattcaccctggaggtggttttgctaactacaatgagaagttcaagggcaaggccacactgactgcagacacatcctccagcacagcctacatgcagctcagcagactgacatctgatgactctgccatctattactgtgcaagatcgggttatgactacggtagtagttacgattaccatggtatggactactggggccaagggaccacggtcaccgtctcctcaggtggtggtggttctggcggcggcggctccggtggtggtggttctgagctcgtgatgacacagtctccatcctccctgactgtgacagcaggagagaaggtcactatgagctgcaagtccagtcagagtctgttaaacagtggaaatcaaaagaactacttggcctggtaccagcagaaaccagggcagcctcctaaactgttgatctacggggcatccactagggaatctggagtccctgatcgcttcacaggcagtggatctgggacagatttcactcttaccatcagcagtgtgcaggctgaagacctggcagattacttctgtcagcaacattatagcactccgtacacgttcggaggggggaccaagcttgagatcaaatccggaggtggtggatccgaggtgcagctggtcgagtctggaggaggattggtgcagcctggagggtcattgaaactctcatgtgcagcctctggattcaccttcaataagtacgccatgaactgggtccgccaggctccaggaaagggtttggaatgggttgctcgcataagaagtaaatataataattatgcaacatattatgccgattcagtgaaagacaggttcaccatctccagagatgattcaaaaaacactgcctatctacaaatgaacaacttgaaaactgaggacactgccgtgtactactgtgtgagacatgggaacttcggtaatagctacatatcctactgggcttactggggccaagggactctggtcaccgtctcctcaggtggtggtggttctggcggcggcggctccggtggtggtggttctcagactgttgtgactcaggaaccttcactcaccgtatcacctggtggaacagtcacactcacttgtggctcctcgactggggctgttacatctggcaactacccaaactgggtccaacaaaaaccaggtcaggcaccccgtggtctaataggtgggactaagttcctcgcccccggtactcctgccagattctcaggctccctgcttggaggcaaggctgccctcaccctctcaggggtacagccagaggatgaggcagaatattactgtgttctatggtacagcaaccgctgggtgttcggtggaggaaccaaactgactgtccta

SEQ ID NO: 1610 - protein, 126 aa, Mus sp.
EVQLLEQSGADLVRPGTSVKLSCKAAGYTFSRYWISWIRQRPGHGLEWIGEIYPGGGYGNYNENFKDKVTLTADTSSSTAYMQLSSLTSEDSAIYYCARSGYDYGSKYDYYGLDYWGQGTTVTVSS

SEQ ID NO: 1611 - protein, 5 aa, Mus sp.
RYWIS

SEQ ID NO: 1612 - protein, 17 aa, Mus sp.
EIYPGGGYGNYNENFKD

SEQ ID NO: 1613 - protein, 16 aa, Mus sp.
SGYDYGSKYDYYGLDY

SEQ ID NO: 1614 - DNA, 378 bp, Mus sp.
gaggtgcagctgctcgagcagtctggagctgacctggtaaggcctgggacttcagtgaagctgtcctgcaaggctgctggatacaccttcagtaggtattggataagttggataaggcagaggcctggacatggccttgagtggattggagaaatttaccctggaggtggttatggtaactacaatgagaatttcaaggacaaggtcacactgactgcagacacatcctccagcacagcctatatgcagctcagcagcctgacatctgaggactctgccatctattattgtgcaagatcggggtatgactacggcagtaagtacgattattatggtttggactactggggccaagggaccacggtcaccgtctcctca

SEQ ID NO: 1615 - protein, 107 aa, Mus sp.
ELVMTQSPSSMYASLGERVTITCKASQDINSYLSWFQQKPGKSPKTLIYRANRLVDGVPSRFSGSGSGQDYSLTISSLEYEDMGIYYCLQYDAFPPTFGAGTKLEIK

SEQ ID NO: 1616 - protein, 11 aa, Mus sp.
KASQDINSYLS

SEQ ID NO: 1617 - protein, 7 aa, Mus sp.
RANRLVD

SEQ ID NO: 1618 - protein, 9 aa, Mus sp.
LQYDAFPPT

SEQ ID NO: 1619 - DNA, 321 bp, Mus sp.
gagctcgtgatgacacagtctccatcttccatgtatgcatctctaggagagagagtcactatcacttgcaaggcgagtcaggacattaatagctatttaagctggttccagcagaaaccagggaaatctcctaagaccctgatctatcgtgcaaacagattggtagatggggtcccatcaaggttcagtggcagtggatctgggcaagattattctctcaccatcagcagcctggagtatgaagatatgggaatttattattgtctacagtatgatgcgtttcctcccacgttcggtgctgggaccaagcttgagatcaaa

SEQ ID NO: 1620 - protein, 248 aa, Mus sp.
EVQLLEQSGADLVRPGTSVKLSCKAAGYTFSRYWISWIRQRPGHGLEWIGEIYPGGGYGNYNENFKDKVTLTADTSSSTAYMQLSSLTSEDSAIYYCARSGYDYGSKYDYYGLDYWGQGTTVTVSSGGGGSGGGGSGGGGSELVMTQSPSSMYASLGERVTITCKASQDINSYLSWFQQKPGKSPKTLIYRANRLVDGVPSRFSGSGSGQDYSLTISSLEYEDMGIYYCLQYDAFPPTFGAGTKLEIK

SEQ ID NO: 1621 - DNA, 744 bp, Mus sp.
gaggtgcagctgctcgagcagtctggagctgacctggtaaggcctgggacttcagtgaagctgtcctgcaaggctgctggatacaccttcagtaggtattggataagttggataaggcagaggcctggacatggccttgagtggattggagaaatttaccctggaggtggttatggtaactacaatgagaatttcaaggacaaggtcacactgactgcagacacatcctccagcacagcctatatgcagctcagcagcctgacatctgaggactctgccatctattattgtgcaagatcggggtatgactacggcagtaagtacgattattatggtttggactactggggccaagggaccacggtcaccgtctcctcaggtggtggtggttctggcggcggcggctccggtggtggtggttctgagctcgtgatgacacagtctccatcttccatgtatgcatctctaggagagagagtcactatcacttgcaaggcgagtcaggacattaatagctatttaagctggttccagcagaaaccagggaaatctcctaagaccctgatctatcgtgcaaacagattggtagatggggtcccatcaaggttcagtggcagtggatctgggcaagattattctctcaccatcagcagcctggagtatgaagatatgggaatttattattgtctacagtatgatgcgtttcctcccacgttcggtgctgggaccaagcttgagatcaaa

SEQ ID NO: 1622 - protein, 503 aa, Mus sp.
EVQLLEQSGADLVRPGTSVKLSCKAAGYTFSRYWISWIRQRPGHGLEWIGEIYPGGGYGNYNENFKDKVTLTADTSSSTAYMQLSSLTSEDSAIYYCARSGYDYGSKYDYYGLDYWGQGTTVTVSSGGGGSGGGGSGGGGSELVMTQSPSSMYASLGERVTITCKASQDINSYLSWFQQKPGKSPKTLIYRANRLVDGVPSRFSGSGSGQDYSLTISSLEYEDMGIYYCLQYDAFPPTFGAGTKLEIKSGGGGSEVQLVESGGGLVQPGGSLKLSCAASGFTFNKYAMNWVRQAPGKGLEWVARIRSKYNNYATYYADSVKDRFTISRDDSKNTAYLQMNNLKTEDTAVYYCVRHGNFGNSYISYWAYWGQGTLVTVSSGGGGSGGGGSGGGGSQTVVTQEPSLTVSPGGTVTLTCGSSTGAVTSGNYPNWVQQKPGQAPRGLIGGTKFLAPGTPARFSGSLLGGKAALTLSGVQPEDEAEYYCVLWYSNRWVFGGGTKLTVL

SEQ ID NO: 1623 - DNA, 1509 bp, Mus sp.
gaggtgcagctgctcgagcagtctggagctgacctggtaaggcctgggacttcagtgaagctgtcctgcaaggctgctggatacaccttcagtaggtattggataagttggataaggcagaggcctggacatggccttgagtggattggagaaatttaccctggaggtggttatggtaactacaatgagaatttcaaggacaaggtcacactgactgcagacacatcctccagcacagcctatatgcagctcagcagcctgacatctgaggactctgccatctattattgtgcaagatcggggtatgactacggcagtaagtacgattattatggtttggactactggggccaagggaccacggtcaccgtctcctcaggtggtggtggttctggcggcggcggctccggtggtggtggttctgagctcgtgatgacacagtctccatcttccatgtatgcatctctaggagagagagtcactatcacttgcaaggcgagtcaggacattaatagctatttaagctggttccagcagaaaccagggaaatctcctaagaccctgatctatcgtgcaaacagattggtagatggggtcccatcaaggttcagtggcagtggatctgggcaagattattctctcaccatcagcagcctggagtatgaagatatgggaatttattattgtctacagtatgatgcgtttcctcccacgttcggtgctgggaccaagcttgagatcaaatccggaggtggtggatccgaggtgcagctggtcgagtctggaggaggattggtgcagcctggagggtcattgaaactctcatgtgcagcctctggattcaccttcaataagtacgccatgaactgggtccgccaggctccaggaaagggtttggaatgggttgctcgcataagaagtaaatataataattatgcaacatattatgccgattcagtgaaagacaggttcaccatctccagagatgattcaaaaaacactgcctatctacaaatgaacaacttgaaaactgaggacactgccgtgtactactgtgtgagacatgggaacttcggtaatagctacatatcctactgggcttactggggccaagggactctggtcaccgtctcctcaggtggtggtggttctggcggcggcggctccggtggtggtggttctcagactgttgtgactcaggaaccttcactcaccgtatcacctggtggaacagtcacactcacttgtggctcctcgactggggctgttacatctggcaactacccaaactgggtccaacaaaaaccaggtcaggcaccccgtggtctaataggtgggactaagttcctcgcccccggtactcctgccagattctcaggctccctgcttggaggcaaggctgccctcaccctctcaggggtacagccagaggatgaggcagaatattactgtgttctatggtacagcaaccgctgggtgttcggtggaggaaccaaactgactgtccta

SEQ ID NO: 1624 - protein, 126 aa, Mus sp.; identical to SEQ ID NO: 1610

SEQ ID NO: 1625 - protein, 5 aa, Mus sp.
RYWIS

SEQ ID NO: 1626 - protein, 17 aa, Mus sp.
EIYPGGGYGNYNENFKD

SEQ ID NO: 1627 - protein, 16 aa, Mus sp.
SGYDYGSKYDYYGLDY

SEQ ID NO: 1628 - DNA, 378 bp, Mus sp.; identical to SEQ ID NO: 1614

SEQ ID NO: 1629 - protein, 107 aa, Mus sp.
ELVMTQSPSSLSASLGERVSLTCRASQEISGYLSWLQQKPDGTIKRLIYAASTLDSGVPKRFSGSRSGSDYSLTISSLESEDFADYYCLQYASSPYTFGGGTKLEIK

SEQ ID NO: 1630 - protein, 11 aa, Mus sp.
RASQEISGYLS

SEQ ID NO: 1631 - protein, 7 aa, Mus sp.
AASTLDS

SEQ ID NO: 1632 - protein, 9 aa, Mus sp.
LQYASSPYT

SEQ ID NO: 1633 - DNA, 321 bp, Mus sp.
gagctcgtcatgacccagtctccatcctccttatctgcctctctgggagaaagagtcagtctcacttgtcgggcaagtcaggaaattagtggttacttaagctggcttcagcagaaaccagatggaactattaaacgcctgatctacgccgcatccactttagattctggtgtcccaaaaaggttcagtggcagtaggtctgggtcagattattctctcaccatcagcagccttgagtctgaagattttgcagactattactgtctacaatatgctagttctccgtacacgttcggaggggggaccaagcttgagatcaaa

SEQ ID NO: 1634 - protein, 248 aa, Mus sp.
EVQLLEQSGADLVRPGTSVKLSCKAAGYTFSRYWISWIRQRPGHGLEWIGEIYPGGGYGNYNENFKDKVTLTADTSSSTAYMQLSSLTSEDSAIYYCARSGYDYGSKYDYYGLDYWGQGTTVTVSSGGGGSGGGGSGGGGSELVMTQSPSSLSASLGERVSLTCRASQEISGYLSWLQQKPDGTIKRLIYAASTLDSGVPKRFSGSRSGSDYSLTISSLESEDFADYYCLQYASSPYTFGGGTKLEIK

SEQ ID NO: 1635 - DNA, 744 bp, Mus sp.
gaggtgcagctgctcgagcagtctggagctgacctggtaaggcctgggacttcagtgaagctgtcctgcaaggctgctggatacaccttcagtaggtattggataagttggataaggcagaggcctggacatggccttgagtggattggagaaatttaccctggaggtggttatggtaactacaatgagaatttcaaggacaaggtcacactgactgcagacacatcctccagcacagcctatatgcagctcagcagcctgacatctgaggactctgccatctattattgtgcaagatcggggtatgactacggcagtaagtacgattattatggtttggactactggggccaagggaccacggtcaccgtctcctcaggtggtggtggttctggcggcggcggctccggtggtggtggttctgagctcgtcatgacccagtctccatcctccttatctgcctctctgggagaaagagtcagtctcacttgtcgggcaagtcaggaaattagtggttacttaagctggcttcagcagaaaccagatggaactattaaacgcctgatctacgccgcatccactttagattctggtgtcccaaaaaggttcagtggcagtaggtctgggtcagattattctctcaccatcagcagccttgagtctgaagattttgcagactattactgtctacaatatgctagttctccgtacacgttcggaggggggaccaagcttgagatcaaa

SEQ ID NO: 1636 - protein, 503 aa, Mus sp.
EVQLLEQSGADLVRPGTSVKLSCKAAGYTFSRYWISWIRQRPGHGLEWIGEIYPGGGYGNYNENFKDKVTLTADTSSSTAYMQLSSLTSEDSAIYYCARSGYDYGSKYDYYGLDYWGQGTTVTVSSGGGGSGGGGSGGGGSELVMTQSPSSLSASLGERVSLTCRASQEISGYLSWLQQKPDGTIKRLIYAASTLDSGVPKRFSGSRSGSDYSLTISSLESEDFADYYCLQYASSPYTFGGGTKLEIKSGGGGSEVQLVESGGGLVQPGGSLKLSCAASGFTFNKYAMNWVRQAPGKGLEWVARIRSKYNNYATYYADSVKDRFTISRDDSKNTAYLQMNNLKTEDTAVYYCVRHGNFGNSYISYWAYWGQGTLVTVSSGGGGSGGGGSGGGGSQTVVTQEPSLTVSPGGTVTLTCGSSTGAVTSGNYPNWVQQKPGQAPRGLIGGTKFLAPGTPARFSGSLLGGKAALTLSGVQPEDEAEYYCVLWYSNRWVFGGGTKLTVL

SEQ ID NO: 1637 - DNA, 1509 bp, Mus sp.
gaggtgcagctgctcgagcagtctggagctgacctggtaaggcctgggacttcagtgaagctgtcctgcaaggctgctggatacaccttcagtaggtattggataagttggataaggcagaggcctggacatggccttgagtggattggagaaatttaccctggaggtggttatggtaactacaatgagaatttcaaggacaaggtcacactgactgcagacacatcctccagcacagcctatatgcagctcagcagcctgacatctgaggactctgccatctattattgtgcaagatcggggtatgactacggcagtaagtacgattattatggtttggactactggggccaagggaccacggtcaccgtctcctcaggtggtggtggttctggcggcggcggctccggtggtggtggttctgagctcgtcatgacccagtctccatcctccttatctgcctctctgggagaaagagtcagtctcacttgtcgggcaagtcaggaaattagtggttacttaagctggcttcagcagaaaccagatggaactattaaacgcctgatctacgccgcatccactttagattctggtgtcccaaaaaggttcagtggcagtaggtctgggtcagattattctctcaccatcagcagccttgagtctgaagattttgcagactattactgtctacaatatgctagttctccgtacacgttcggaggggggaccaagcttgagatcaaatccggaggtggtggatccgaggtgcagctggtcgagtctggaggaggattggtgcagcctggagggtcattgaaactctcatgtgcagcctctggattcaccttcaataagtacgccatgaactgggtccgccaggctccaggaaagggtttggaatgggttgctcgcataagaagtaaatataataattatgcaacatattatgccgattcagtgaaagacaggttcaccatctccagagatgattcaaaaaacactgcctatctacaaatgaacaacttgaaaactgaggacactgccgtgtactactgtgtgagacatgggaacttcggtaatagctacatatcctactgggcttactggggccaagggactctggtcaccgtctcctcaggtggtggtggttctggcggcggcggctccggtggtggtggttctcagactgttgtgactcaggaaccttcactcaccgtatcacctggtggaacagtcacactcacttgtggctcctcgactggggctgttacatctggcaactacccaaactgggtccaacaaaaaccaggtcaggcaccccgtggtctaataggtgggactaagttcctcgcccccggtactcctgccagattctcaggctccctgcttggaggcaaggctgccctcaccctctcaggggtacagccagaggatgaggcagaatattactgtgttctatggtacagcaaccgctgggtgttcggtggaggaaccaaactgactgtccta

SEQ ID NO: 1638 - protein, 126 aa, Mus sp.
EVQLLEQSGAELMKPGASVKISCKATGYTFSNYWIGWVKQRPGHGLEWIGDIYPGGSYTNYNEKFKGKVTLTADTSSRTAYMQLSSLTFEDSAIYYCARSGYDYASDYDYHGMDYWGQGTTVTVSS

SEQ ID NO: 1639 - protein, 5 aa, Mus sp.
NYWIG

SEQ ID NO: 1640 - protein, 17 aa, Mus sp.
DIYPGGSYTNYNEKFKG

SEQ ID NO: 1641 - protein, 16 aa, Mus sp.
SGYDYASDYDYHGMDY

SEQ ID NO: 1642 - DNA, 378 bp, Mus sp.
gaggtgcagctgctcgagcagtctggagctgagctgatgaagcctggggcctcagtgaagatatcctgcaaggctactggatacaccttcagtaattactggataggttgggtaaagcagaggcctggacatggccttgagtggattggagatatttaccctggaggtagttatactaactacaatgagaaattcaagggcaaggtcacactgactgcagacacatcctccaggacagcctacatgcagctcagcagcctgacatttgaggactctgccatctattactgtgcaagatcggggtatgactacgctagtgactacgattaccatggtatggactactggggccaagggaccacggtcaccgtctcctca

SEQ ID NO: 1643 - protein, 107 aa, Mus sp.
ELVLTQSPSSMSASLGDRITITCQATQDIVKNLNWYQQKPGKPPSFLIYYATELAEGVPSRFSGSGSGSDYSLTISNLESEDFADYYCLQFYEFPYTFGGGTKLEIK

SEQ ID NO: 1644 - protein, 11 aa, Mus sp.
QATQDIVKNLN

SEQ ID NO: 1645 - protein, 7 aa, Mus sp.
YATELAE

SEQ ID NO: 1646 - protein, 9 aa, Mus sp.
LQFYEFPYT

SEQ ID NO: 1647 - DNA, 321 bp, Mus sp.
gagctcgtgctcacccagtctccatcctctatgtctgcatctctgggagacagaataaccatcacttgccaggcaactcaagacattgttaagaatttaaactggtatcagcagaaaccagggaaacccccttcattcctgatctattatgcaactgaactggcagaaggggtcccatcaaggttcagtggcagtgggtctgggtcagactattctctgacaatcagcaacctggagtctgaagattttgcagactattactgtctacagttttatgagtttccgtacacgttcggaggggggaccaagcttgagatcaaa

SEQ ID NO: 1648 - protein, 248 aa, Mus sp.
EVQLLEQSGAELMKPGASVKISCKATGYTFSNYWIGWVKQRPGHGLEWIGDIYPGGSYTNYNEKFKGKVTLTADTSSRTAYMQLSSLTFEDSAIYYCARSGYDYASDYDYHGMDYWGQGTTVTVSSGGGGSGGGGSGGGGSELVLTQSPSSMSASLGDRITITCQATQDIVKNLNWYQQKPGKPPSFLIYYATELAEGVPSRFSGSGSGSDYSLTISNLESEDFADYYCLQFYEFPYTFGGGTKLEIK

SEQ ID NO: 1649 - DNA, 744 bp, Mus sp.
gaggtgcagctgctcgagcagtctggagctgagctgatgaagcctggggcctcagtgaagatatcctgcaaggctactggatacaccttcagtaattactggataggttgggtaaagcagaggcctggacatggccttgagtggattggagatatttaccctggaggtagttatactaactacaatgagaaattcaagggcaaggtcacactgactgcagacacatcctccaggacagcctacatgcagctcagcagcctgacatttgaggactctgccatctattactgtgcaagatcggggtatgactacgctagtgactacgattaccatggtatggactactggggccaagggaccacggtcaccgtctcctcaggtggtggtggttctggcggcggcggctccggtggtggtggttctgagctcgtgctcacccagtctccatcctctatgtctgcatctctgggagacagaataaccatcacttgccaggcaactcaagacattgttaagaatttaaactggtatcagcagaaaccagggaaacccccttcattcctgatctattatgcaactgaactggcagaaggggtcccatcaaggttcagtggcagtgggtctgggtcagactattctctgacaatcagcaacctggagtctgaagattttgcagactattactgtctacagttttatgagtttccgtacacgttcggaggggggaccaagcttgagatcaaa

SEQ ID NO: 1650 - protein, 503 aa, Mus sp.
EVQLLEQSGAELMKPGASVKISCKATGYTFSNYWIGWVKQRPGHGLEWIGDIYPGGSYTNYNEKFKGKVTLTADTSSRTAYMQLSSLTFEDSAIYYCARSGYDYASDYDYHGMDYWGQGTTVTVSSGGGGSGGGGSGGGGSELVLTQSPSSMSASLGDRITITCQATQDIVKNLNWYQQKPGKPPSFLIYYATELAEGVPSRFSGSGSGSDYSLTISNLESEDFADYYCLQFYEFPYTFGGGTKLEIKSGGGGSEVQLVESGGGLVQPGGSLKLSCAASGFTFNKYAMNWVRQAPGKGLEWVARIRSKYNNYATYYADSVKDRFTISRDDSKNTAYLQMNNLKTEDTAVYYCVRHGNFGNSYISYWAYWGQGTLVTVSSGGGGSGGGGSGGGGSQTVVTQEPSLTVSPGGTVTLTCGSSTGAVTSGNYPNWVQQKPGQAPRGLIGGTKFLAPGTPARFSGSLLGGKAALTLSGVQPEDEAEYYCVLWYSNRWVFGGGTKLTVL

SEQ ID NO: 1651 - DNA, 1509 bp, Mus sp.
gaggtgcagctgctcgagcagtctggagctgagctgatgaagcctggggcctcagtgaagatatcctgcaaggctactggatacaccttcagtaattactggataggttgggtaaagcagaggcctggacatggccttgagtggattggagatatttaccctggaggtagttatactaactacaatgagaaattcaagggcaaggtcacactgactgcagacacatcctccaggacagcctacatgcagctcagcagcctgacatttgaggactctgccatctattactgtgcaagatcggggtatgactacgctagtgactacgattaccatggtatggactactggggccaagggaccacggtcaccgtctcctcaggtggtggtggttctggcggcggcggctccggtggtggtggttctgagctcgtgctcacccagtctccatcctctatgtctgcatctctgggagacagaataaccatcacttgccaggcaactcaagacattgttaagaatttaaactggtatcagcagaaaccagggaaacccccttcattcctgatctattatgcaactgaactggcagaaggggtcccatcaaggttcagtggcagtgggtctgggtcagactattctctgacaatcagcaacctggagtctgaagattttgcagactattactgtctacagttttatgagtttccgtacacgttcggaggggggaccaagcttgagatcaaatccggaggtggtggatccgaggtgcagctggtcgagtctggaggaggattggtgcagcctggagggtcattgaaactctcatgtgcagcctctggattcaccttcaataagtacgccatgaactgggtccgccaggctccaggaaagggtttggaatgggttgctcgcataagaagtaaatataataattatgcaacatattatgccgattcagtgaaagacaggttcaccatctccagagatgattcaaaaaacactgcctatctacaaatgaacaacttgaaaactgaggacactgccgtgtactactgtgtgagacatgggaacttcggtaatagctacatatcctactgggcttactggggccaagggactctggtcaccgtctcctcaggtggtggtggttctggcggcggcggctccggtggtggtggttctcagactgttgtgactcaggaaccttcactcaccgtatcacctggtggaacagtcacactcacttgtggctcctcgactggggctgttacatctggcaactacccaaactgggtccaacaaaaaccaggtcaggcaccccgtggtctaataggtgggactaagttcctcgcccccggtactcctgccagattctcaggctccctgcttggaggcaaggctgccctcaccctctcaggggtacagccagaggatgaggcagaatattactgtgttctatggtacagcaaccgctgggtgttcggtggaggaaccaaactgactgtccta

SEQ ID NO: 1652 - protein, 124 aa, Artificial Sequence
  EN00B12-H
QVQLVQSGPEVKKPGASVKLSCKASGYTFTDYVIHWVKQAPGQRLEWMGYINPYDDDTTYNQKFKGRVTITVDTSASTAYMELNSLRSEDTAVYYCARRGNSYDGYFDYSMDYWGQGTLVTVSS

SEQ ID NO: 1653 - protein, 5 aa, Artificial Sequence
  EN00B12-HCDR1
DYVIH

SEQ ID NO: 1654 - protein, 17 aa, Artificial Sequence
  EN00B12-HCDR2
YINPYDDDTTYNQKFKG

SEQ ID NO: 1655 - protein, 15 aa, Artificial Sequence
  EN00B12-HCDR3
RGNSYDGYFDYSMDY

SEQ ID NO: 1656 - DNA, 372 bp, Artificial Sequence
  EN00B12-H
caggtgcagctggtccagtcaggacctgaggtgaagaagcctggggcttcagtgaagttgtcctgcaaggcttctggatacacattcactgactatgttatacactgggtgaagcaggcacctggacagcgccttgagtggatgggatatattaatccttatgatgatgatactacctacaaccagaagttcaagggccgggtcacaattactgtagacacatccgccagcacagcctacatggagctcaacagcctgagatctgaggacactgcagtctattactgtgcaagaagggggaactcctatgatggttacttcgactattctatggactactggggtcaaggaaccttggtcaccgtctcctca

SEQ ID NO: 1657 - protein, 108 aa, Artificial Sequence
  EN00B12-L
DIQLTQSPSFLSASVGDRVTITCRASQNVGTAVAWYQQKPGKAPKLLIYSASNRYTGVPSRFSGSGSGTEFTLTISSLQPEDFATYYCQQYTNYPMYTFGQGTKLEIK

SEQ ID NO: 1658 - protein, 11 aa, Artificial Sequence
  EN00B12-LCDR1
RASQNVGTAVA

SEQ ID NO: 1659 - protein, 7 aa, Artificial Sequence
  EN00B12-LCDR2
SASNRYT

SEQ ID NO: 1660 - protein, 10 aa, Artificial Sequence
  EN00B12-LCDR3
QQYTNYPMYT

SEQ ID NO: 1661 - DNA, 324 bp, Artificial Sequence
  EN00B12-L
gacatccagctgacccagtctccaagcttcctgtccgcatcagtaggagacagagtcaccatcacctgcagggccagtcagaatgtgggtactgctgtagcctggtatcaacagaaaccaggaaaagcccctaaattactgatttactcggcatcgaatcggtacactggagtccctagtcgcttctcaggcagtggatctgggacagagttcactctcaccatcagcagtctgcagcctgaagacttcgcaacttattactgccagcaatataccaactatcccatgtatacgtttggacaggggaccaagctggaaataaaa

SEQ ID NO: 1662 - protein, 247 aa, Artificial Sequence
  EN00B12-HL
QVQLVQSGPEVKKPGASVKLSCKASGYTFTDYVIHWVKQAPGQRLEWMGYINPYDDDTTYNQKFKGRVTITVDTSASTAYMELNSLRSEDTAVYYCARRGNSYDGYFDYSMDYWGQGTLVTVSSGGGGSGGGGSGGGGSDIQLTQSPSFLSASVGDRVTITCRASQNVGTAVAWYQQKPGKAPKLLIYSASNRYTGVPSRFSGSGSGTEFTLTISSLQPEDFATYYCQQYTNYPMYTFGQGTKLEIK

SEQ ID NO: 1663 - DNA, 741 bp, Artificial Sequence
  EN00B12-HL
caggtgcagctggtccagtcaggacctgaggtgaagaagcctggggcttcagtgaagttgtcctgcaaggcttctggatacacattcactgactatgttatacactgggtgaagcaggcacctggacagcgccttgagtggatgggatatattaatccttatgatgatgatactacctacaaccagaagttcaagggccgggtcacaattactgtagacacatccgccagcacagcctacatggagctcaacagcctgagatctgaggacactgcagtctattactgtgcaagaagggggaactcctatgatggttacttcgactattctatggactactggggtcaaggaaccttggtcaccgtctcctcaggtggtggtggttctggcggcggcggctccggtggtggtggttctgacatccagctgacccagtctccaagcttcctgtccgcatcagtaggagacagagtcaccatcacctgcagggccagtcagaatgtgggtactgctgtagcctggtatcaacagaaaccaggaaaagcccctaaattactgatttactcggcatcgaatcggtacactggagtccctagtcgcttctcaggcagtggatctgggacagagttcactctcaccatcagcagtctgcagcctgaagacttcgcaacttattactgccagcaatataccaactatcccatgtatacgtttggacaggggaccaagctggaaataaaa

SEQ ID NO: 1664 - protein, 502 aa, Artificial Sequence
  EN00B12 HL x I2C HL
QVQLVQSGPEVKKPGASVKLSCKASGYTFTDYVIHWVKQAPGQRLEWMGYINPYDDDTTYNQKFKGRVTITVDTSASTAYMELNSLRSEDTAVYYCARRGNSYDGYFDYSMDYWGQGTLVTVSSGGGGSGGGGSGGGGSDIQLTQSPSFLSASVGDRVTITCRASQNVGTAVAWYQQKPGKAPKLLIYSASNRYTGVPSRFSGSGSGTEFTLTISSLQPEDFATYYCQQYTNYPMYTFGQGTKLEIKSGGGGSEVQLVESGGGLVQPGGSLKLSCAASGFTFNKYAMNWVRQAPGKGLEWVARIRSKYNNYATYYADSVKDRFTISRDDSKNTAYLQMNNLKTEDTAVYYCVRHGNFGNSYISYWAYWGQGTLVTVSSGGGGSGGGGSGGGGSQTVVTQEPSLTVSPGGTVTLTCGSSTGAVTSGNYPNWVQQKPGQAPRGLIGGTKFLAPGTPARFSGSLLGGKAALTLSGVQPEDEAEYYCVLWYSNRWVFGGGTKLTVL

SEQ ID NO: 1665 - DNA, 1506 bp, Artificial Sequence
  EN00B12 HL x I2C HL
caggtgcagctggtccagtcaggacctgaggtgaagaagcctggggcttcagtgaagttgtcctgcaaggcttctggatacacattcactgactatgttatacactgggtgaagcaggcacctggacagcgccttgagtggatgggatatattaatccttatgatgatgatactacctacaaccagaagttcaagggccgggtcacaattactgtagacacatccgccagcacagcctacatggagctcaacagcctgagatctgaggacactgcagtctattactgtgcaagaagggggaactcctatgatggttacttcgactattctatggactactggggtcaaggaaccttggtcaccgtctcctcaggtggtggtggttctggcggcggcggctccggtggtggtggttctgacatccagctgacccagtctccaagcttcctgtccgcatcagtaggagacagagtcaccatcacctgcagggccagtcagaatgtgggtactgctgtagcctggtatcaacagaaaccaggaaaagcccctaaattactgatttactcggcatcgaatcggtacactggagtccctagtcgcttctcaggcagtggatctgggacagagttcactctcaccatcagcagtctgcagcctgaagacttcgcaacttattactgccagcaatataccaactatcccatgtatacgtttggacaggggaccaagctggaaataaaatccggaggtggtggatccgaggtgcagctggtcgagtctggaggaggattggtgcagcctggagggtcattgaaactctcatgtgcagcctctggattcaccttcaataagtacgccatgaactgggtccgccaggctccaggaaagggtttggaatgggttgctcgcataagaagtaaatataataattatgcaacatattatgccgattcagtgaaagacaggttcaccatctccagagatgattcaaaaaacactgcctatctacaaatgaacaacttgaaaactgaggacactgccgtgtactactgtgtgagacatgggaacttcggtaatagctacatatcctactgggcttactggggccaagggactctggtcaccgtctcctcaggtggtggtggttctggcggcggcggctccggtggtggtggttctcagactgttgtgactcaggaaccttcactcaccgtatcacctggtggaacagtcacactcacttgtggctcctcgactggggctgttacatctggcaactacccaaactgggtccaacaaaaaccaggtcaggcaccccgtggtctaataggtgggactaagttcctcgcccccggtactcctgccagattctcaggctccctgcttggaggcaaggctgccctcaccctctcaggggtacagccagaggatgaggcagaatattactgtgttctatggtacagcaaccgctgggtgttcggtggaggaaccaaactgactgtccta

SEQ ID NO: 1666 - protein, 124 aa, Artificial Sequence
  EN00C3-H
QVQLVQSGPEVKKPGASVKMSCKASGYTFTDYVIHWVRQGPGQRLEWMGYINPYDDDTTYNQKFKGRVTMTLDKSASTAYMQLNSLRSEDTAVYYCARRGNSYDGYFDYSMDYWGQGTLVTVSS

SEQ ID NO: 1667 - protein, 5 aa, Artificial Sequence
  EN00C3-HCDR1
DYVIH

SEQ ID NO: 1668 - protein, 17 aa, Artificial Sequence
  EN00C3-HCDR2
YINPYDDDTTYNQKFKG

SEQ ID NO: 1669 - protein, 15 aa, Artificial Sequence
  EN00C3-HCDR3
RGNSYDGYFDYSMDY

SEQ ID NO: 1670 - DNA, 372 bp, Artificial Sequence
  EN00C3-H
caggtgcagctggtccagtcaggacctgaggtgaagaagcctggggcttcagtgaagatgtcctgcaaggcttctggatacacattcactgactatgttatacactgggtgaggcagggacctggacagcgtcttgagtggatgggatatattaatccttatgatgatgatactacctacaaccagaagttcaagggccgggtcacaatgactctagacaaatccgccagcacagcctacatgcaactcaacagcctgagatctgaggacactgcagtctattactgtgcaagaagggggaactcctatgatggttacttcgactattctatggactactggggtcaaggaaccttggtcaccgtctcctca

SEQ ID NO: 1671 - protein, 108 aa, Artificial Sequence
  EN00C3-L
DIQLTQSPNFLSASVGDRVTITCRASQNVGTAVAWYQQKPGKAPKLLIYSASNRYTGVPSRFSGSGSGTDFTLTISSLQPEDFATYYCQQYTNYPMYTFGQGTKLEIK

SEQ ID NO: 1672 - protein, 11 aa, Artificial Sequence
  EN00C3-LCDR1
RASQNVGTAVA

SEQ ID NO: 1673 - protein, 7 aa, Artificial Sequence
  EN00C3-LCDR2
SASNRYT

SEQ ID NO: 1674 - protein, 10 aa, Artificial Sequence
  EN00C3-LCDR3
QQYTNYPMYT

SEQ ID NO: 1675 - DNA, 324 bp, Artificial Sequence
  EN00C3-L
gacatccagctgacccagtctccaaacttcctgtccgcatcagtaggagacagagtcaccatcacctgcagggccagtcagaatgtgggtactgctgtagcctggtatcaacagaaaccaggaaaagcccctaaattactgatttactcggcatcgaatcggtacactggagtccctagtcgcttctcaggcagtggatctgggacagatttcactctcaccatcagcagtctgcagcctgaagacttcgcaacttattactgccagcaatataccaactatcccatgtatacgtttggacaggggaccaagctggaaataaaa

SEQ ID NO: 1676 - protein, 247 aa, Artificial Sequence
  EN00C3-HL
QVQLVQSGPEVKKPGASVKMSCKASGYTFTDYVIHWVRQGPGQRLEWMGYINPYDDDTTYNQKFKGRVTMTLDKSASTAYMQLNSLRSEDTAVYYCARRGNSYDGYFDYSMDYWGQGTLVTVSSGGGGSGGGGSGGGGSDIQLTQSPNFLSASVGDRVTITCRASQNVGTAVAWYQQKPGKAPKLLIYSASNRYTGVPSRFSGSGSGTDFTLTISSLQPEDFATYYCQQYTNYPMYTFGQGTKLEIK

SEQ ID NO: 1677 - DNA, 741 bp, Artificial Sequence
  EN00C3-HL
caggtgcagctggtccagtcaggacctgaggtgaagaagcctggggcttcagtgaagatgtcctgcaaggcttctggatacacattcactgactatgttatacactgggtgaggcagggacctggacagcgtcttgagtggatgggatatattaatccttatgatgatgatactacctacaaccagaagttcaagggccgggtcacaatgactctagacaaatccgccagcacagcctacatgcaactcaacagcctgagatctgaggacactgcagtctattactgtgcaagaagggggaactcctatgatggttacttcgactattctatggactactggggtcaaggaaccttggtcaccgtctcctcaggtggtggtggttctggcggcggcggctccggtggtggtggttctgacatccagctgacccagtctccaaacttcctgtccgcatcagtaggagacagagtcaccatcacctgcagggccagtcagaatgtgggtactgctgtagcctggtatcaacagaaaccaggaaaagcccctaaattactgatttactcggcatcgaatcggtacactggagtccctagtcgcttctcaggcagtggatctgggacagatttcactctcaccatcagcagtctgcagcctgaagacttcgcaacttattactgccagcaatataccaactatcccatgtatacgtttggacaggggaccaagctggaaataaaa

SEQ ID NO: 1678 - protein, 502 aa, Artificial Sequence
  EN00C3 HL x I2C HL
QVQLVQSGPEVKKPGASVKMSCKASGYTFTDYVIHWVRQGPGQRLEWMGYINPYDDDTTYNQKFKGRVTMTLDKSASTAYMQLNSLRSEDTAVYYCARRGNSYDGYFDYSMDYWGQGTLVTVSSGGGGSGGGGSGGGGSDIQLTQSPNFLSASVGDRVTITCRASQNVGTAVAWYQQKPGKAPKLLIYSASNRYTGVPSRFSGSGSGTDFTLTISSLQPEDFATYYCQQYTNYPMYTFGQGTKLEIKSGGGGSEVQLVESGGGLVQPGGSLKLSCAASGFTFNKYAMNWVRQAPGKGLEWVARIRSKYNNYATYYADSVKDRFTISRDDSKNTAYLQMNNLKTEDTAVYYCVRHGNFGNSYISYWAYWGQGTLVTVSSGGGGSGGGGSGGGGSQTVVTQEPSLTVSPGGTVTLTCGSSTGAVTSGNYPNWVQQKPGQAPRGLIGGTKFLAPGTPARFSGSLLGGKAALTLSGVQPEDEAEYYCVLWYSNRWVFGGGTKLTVL

SEQ ID NO: 1679 - DNA, 1506 bp, Artificial Sequence
  EN00C3 HL x I2C HL
caggtgcagctggtccagtcaggacctgaggtgaagaagcctggggcttcagtgaagatgtcctgcaaggcttctggatacacattcactgactatgttatacactgggtgaggcagggacctggacagcgtcttgagtggatgggatatattaatccttatgatgatgatactacctacaaccagaagttcaagggccgggtcacaatgactctagacaaatccgccagcacagcctacatgcaactcaacagcctgagatctgaggacactgcagtctattactgtgcaagaagggggaactcctatgatggttacttcgactattctatggactactggggtcaaggaaccttggtcaccgtctcctcaggtggtggtggttctggcggcggcggctccggtggtggtggttctgacatccagctgacccagtctccaaacttcctgtccgcatcagtaggagacagagtcaccatcacctgcagggccagtcagaatgtgggtactgctgtagcctggtatcaacagaaaccaggaaaagcccctaaattactgatttactcggcatcgaatcggtacactggagtccctagtcgcttctcaggcagtggatctgggacagatttcactctcaccatcagcagtctgcagcctgaagacttcgcaacttattactgccagcaatataccaactatcccatgtatacgtttggacaggggaccaagctggaaataaaatccggaggtggtggatccgaggtgcagctggtcgagtctggaggaggattggtgcagcctggagggtcattgaaactctcatgtgcagcctctggattcaccttcaataagtacgccatgaactgggtccgccaggctccaggaaagggtttggaatgggttgctcgcataagaagtaaatataataattatgcaacatattatgccgattcagtgaaagacaggttcaccatctccagagatgattcaaaaaacactgcctatctacaaatgaacaacttgaaaactgaggacactgccgtgtactactgtgtgagacatgggaacttcggtaatagctacatatcctactgggcttactggggccaagggactctggtcaccgtctcctcaggtggtggtggttctggcggcggcggctccggtggtggtggttctcagactgttgtgactcaggaaccttcactcaccgtatcacctggtggaacagtcacactcacttgtggctcctcgactggggctgttacatctggcaactacccaaactgggtccaacaaaaaccaggtcaggcaccccgtggtctaataggtgggactaagttcctcgcccccggtactcctgccagattctcaggctccctgcttggaggcaaggctgccctcaccctctcaggggtacagccagaggatgaggcagaatattactgtgttctatggtacagcaaccgctgggtgttcggtggaggaaccaaactgactgtccta

SEQ ID NO: 1680 - protein, 124 aa, Artificial Sequence
  EN01D5-H
QVQLVQSGPEVMKPGASVKMSCKASGYTFTDYVIHWVRQAPGKRLEWMGYINPYDDDTTYNQKFKGRVTITVDKSASTAYMELNSLTSEDTAVYYCARRGNSYDGYFDYSMDYWGQGTLVTVSS

SEQ ID NO: 1681 - protein, 5 aa, Artificial Sequence
  EN01D5-HCDR1
DYVIH

SEQ ID NO: 1682 - protein, 17 aa, Artificial Sequence
  EN01D5-HCDR2
YINPYDDDTTYNQKFKG

SEQ ID NO: 1683 - protein, 15 aa, Artificial Sequence
  EN01D5-HCDR3
RGNSYDGYFDYSMDY

SEQ ID NO: 1684 - DNA, 372 bp, Artificial Sequence; identical to SEQ ID NO: 1246
  EN01D5-H

SEQ ID NO: 1685 - protein, 108 aa, Artificial Sequence
  EN01D5-L
DIQLTQSPSFMSASVGDRVTITCRASQNVGTAVAWYQQKPGQAPKLLIYSASNRYTGVPSRFSGSGSGTEFTLTISSLQSEDFATYYCQQYTNYPMYTFGQGTKLEIK

SEQ ID NO: 1686 - protein, 11 aa, Artificial Sequence
  EN01D5-LCDR1
RASQNVGTAVA

SEQ ID NO: 1687 - protein, 7 aa, Artificial Sequence
  EN01D5-LCDR2
SASNRYT

SEQ ID NO: 1688 - protein, 10 aa, Artificial Sequence
  EN01D5-LCDR3
QQYTNYPMYT

SEQ ID NO: 1689 - DNA, 324 bp, Artificial Sequence
  EN01D5-L
gacatccagctgacccagtctccaagcttcatgtccgcatcagtaggagacagagtcaccatcacctgcagggccagtcagaatgtgggtactgctgtagcctggtatcaacagaaaccaggacaagcccctaaattactgatttactcggcatcgaatcggtacactggagtccctagtcgcttctcaggcagtggatctgggacagagttcactctcaccatcagcagtctgcagtctgaagacttcgcaacttattactgccagcaatataccaactatcccatgtatacgtttggacaggggaccaagctggaaataaaa

SEQ ID NO: 1690 - protein, 247 aa, Artificial Sequence
  EN01D5-HL
QVQLVQSGPEVMKPGASVKMSCKASGYTFTDYVIHWVRQAPGKRLEWMGYINPYDDDTTYNQKFKGRVTITVDKSASTAYMELNSLTSEDTAVYYCARRGNSYDGYFDYSMDYWGQGTLVTVSSGGGGSGGGGSGGGGSDIQLTQSPSFMSASVGDRVTITCRASQNVGTAVAWYQQKPGQAPKLLIYSASNRYTGVPSRFSGSGSGTEFTLTISSLQSEDFATYYCQQYTNYPMYTFGQGTKLEIK

SEQ ID NO: 1691 - DNA, 741 bp, Artificial Sequence
  EN01D5-HL
caggtgcagctggtccagtcaggacctgaggtgatgaagcctggggcttcagtgaagatgtcctgcaaggcttctggatacacattcactgactatgttatacactgggtgaggcaggcacctggaaagcgccttgagtggatgggatatattaatccttatgatgatgatactacctacaaccagaagttcaagggccgggtcacaattactgtagacaaatccgccagcacagcctacatggaactcaacagcctgacatctgaggacactgcagtctattactgtgcaagaagggggaactcctatgatggttacttcgactattctatggactactggggtcaaggaaccttggtcaccgtctcctcaggtggtggtggttctggcggcggcggctccggtggtggtggttctgacatccagctgacccagtctccaagcttcatgtccgcatcagtaggagacagagtcaccatcacctgcagggccagtcagaatgtgggtactgctgtagcctggtatcaacagaaaccaggacaagcccctaaattactgatttactcggcatcgaatcggtacactggagtccctagtcgcttctcaggcagtggatctgggacagagttcactctcaccatcagcagtctgcagtctgaagacttcgcaacttattactgccagcaatataccaactatcccatgtatacgtttggacaggggaccaagctggaaataaaa

SEQ ID NO: 1692 - protein, 502 aa, Artificial Sequence
  EN01D5 HL x I2C HL
QVQLVQSGPEVMKPGASVKMSCKASGYTFTDYVIHWVRQAPGKRLEWMGYINPYDDDTTYNQKFKGRVTITVDKSASTAYMELNSLTSEDTAVYYCARRGNSYDGYFDYSMDYWGQGTLVTVSSGGGGSGGGGSGGGGSDIQLTQSPSFMSASVGDRVTITCRASQNVGTAVAWYQQKPGQAPKLLIYSASNRYTGVPSRFSGSGSGTEFTLTISSLQSEDFATYYCQQYTNYPMYTFGQGTKLEIKSGGGGSEVQLVESGGGLVQPGGSLKLSCAASGFTFNKYAMNWVRQAPGKGLEWVARIRSKYNNYATYYADSVKDRFTISRDDSKNTAYLQMNNLKTEDTAVYYCVRHGNFGNSYISYWAYWGQGTLVTVSSGGGGSGGGGSGGGGSQTVVTQEPSLTVSPGGTVTLTCGSSTGAVTSGNYPNWVQQKPGQAPRGLIGGTKFLAPGTPARFSGSLLGGKAALTLSGVQPEDEAEYYCVLWYSNRWVFGGGTKLTVL

SEQ ID NO: 1693 - DNA, 1506 bp, Artificial Sequence
  EN01D5 HL x I2C HL
caggtgcagctggtccagtcaggacctgaggtgatgaagcctggggcttcagtgaagatgtcctgcaaggcttctggatacacattcactgactatgttatacactgggtgaggcaggcacctggaaagcgccttgagtggatgggatatattaatccttatgatgatgatactacctacaaccagaagttcaagggccgggtcacaattactgtagacaaatccgccagcacagcctacatggaactcaacagcctgacatctgaggacactgcagtctattactgtgcaagaagggggaactcctatgatggttacttcgactattctatggactactggggtcaaggaaccttggtcaccgtctcctcaggtggtggtggttctggcggcggcggctccggtggtggtggttctgacatccagctgacccagtctccaagcttcatgtccgcatcagtaggagacagagtcaccatcacctgcagggccagtcagaatgtgggtactgctgtagcctggtatcaacagaaaccaggacaagcccctaaattactgatttactcggcatcgaatcggtacactggagtccctagtcgcttctcaggcagtggatctgggacagagttcactctcaccatcagcagtctgcagtctgaagacttcgcaacttattactgccagcaatataccaactatcccatgtatacgtttggacaggggaccaagctggaaataaaatccggaggtggtggatccgaggtgcagctggtcgagtctggaggaggattggtgcagcctggagggtcattgaaactctcatgtgcagcctctggattcaccttcaataagtacgccatgaactgggtccgccaggctccaggaaagggtttggaatgggttgctcgcataagaagtaaatataataattatgcaacatattatgccgattcagtgaaagacaggttcaccatctccagagatgattcaaaaaacactgcctatctacaaatgaacaacttgaaaactgaggacactgccgtgtactactgtgtgagacatgggaacttcggtaatagctacatatcctactgggcttactggggccaagggactctggtcaccgtctcctcaggtggtggtggttctggcggcggcggctccggtggtggtggttctcagactgttgtgactcaggaaccttcactcaccgtatcacctggtggaacagtcacactcacttgtggctcctcgactggggctgttacatctggcaactacccaaactgggtccaacaaaaaccaggtcaggcaccccgtggtctaataggtgggactaagttcctcgcccccggtactcctgccagattctcaggctccctgcttggaggcaaggctgccctcaccctctcaggggtacagccagaggatgaggcagaatattactgtgttctatggtacagcaaccgctgggtgttcggtggaggaaccaaactgactgtccta

SEQ ID NO: 1694 - protein, 124 aa, Artificial Sequence
  EN00E4-H
QVQLVQSGPEVKKPGASVKLSCKASGYTFTDYVIHWMRQAPGQRLEWMGYINPYDDDTTYNQKFKGRVTITLDTSASTAYMELNSLRSEDTAVYYCARRGNSYDGYFDYSMDYWGQGTLVTVSS

SEQ ID NO: 1695 - protein, 5 aa, Artificial Sequence
  EN00E4-HCDR1
DYVIH

SEQ ID NO: 1696 - protein, 17 aa, Artificial Sequence
  EN00E4-HCDR2
YINPYDDDTTYNQKFKG

SEQ ID NO: 1697 - protein, 15 aa, Artificial Sequence
  EN00E4-HCDR3
RGNSYDGYFDYSMDY

SEQ ID NO: 1698 - DNA, 372 bp, Artificial Sequence
  EN00E4-H
caggtgcagctggtccagtcaggacctgaggtgaagaagcctggggcttcagtgaagttgtcctgcaaggcttctggatacacattcactgactatgttatacactggatgaggcaggcacctggacagcgccttgagtggatgggatatattaatccttatgatgatgatactacctacaaccagaagttcaagggccgggtcacaattactctagacacatccgccagcacagcctacatggaactcaacagcctgagatctgaggacactgcagtctattactgtgcaagaagggggaactcctatgatggttacttcgactattctatggactactggggtcaaggaaccttggtcaccgtctcctca

SEQ ID NO: 1699 - protein, 108 aa, Artificial Sequence
  EN00E4-L
DIQLTQSPKFMSTSVGDKVTITCRASQNVGTAVAWYQQKPGKAPKLLIYSASNRYTGVPSRFSGSGSGTEFTLTISSLQPEDFANYFCQQYTNYPMYTFGQGTKLEIK

SEQ ID NO: 1700 - protein, 11 aa, Artificial Sequence
  EN00E4-LCDR1
RASQNVGTAVA

SEQ ID NO: 1701 - protein, 7 aa, Artificial Sequence
  EN00E4-LCDR2
SASNRYT

SEQ ID NO: 1702 - protein, 10 aa, Artificial Sequence
  EN00E4-LCDR3
QQYTNYPMYT

SEQ ID NO: 1703 - DNA, 324 bp, Artificial Sequence
  EN00E4-L
gacatccagctgacccagtctccaaaattcatgtccacatcagtaggagacaaagtcaccatcacctgcagggccagtcagaatgtgggtactgctgtagcctggtatcaacagaaaccaggaaaagcccctaaattactgatttactcggcatcgaatcggtacactggagtccctagtcgcttctcaggcagtggatctgggacagagttcactctcaccatcagcagtctgcagcctgaagacttcgcaaattatttctgccagcaatataccaactatcccatgtatacgtttggacaggggaccaagctggaaataaaa

SEQ ID NO: 1704 - protein, 247 aa, Artificial Sequence
  EN00E4-HL
QVQLVQSGPEVKKPGASVKLSCKASGYTFTDYVIHWMRQAPGQRLEWMGYINPYDDDTTYNQKFKGRVTITLDTSASTAYMELNSLRSEDTAVYYCARRGNSYDGYFDYSMDYWGQGTLVTVSSGGGGSGGGGSGGGGSDIQLTQSPKFMSTSVGDKVTITCRASQNVGTAVAWYQQKPGKAPKLLIYSASNRYTGVPSRFSGSGSGTEFTLTISSLQPEDFANYFCQQYTNYPMYTFGQGTKLEIK

SEQ ID NO: 1705 - DNA, 741 bp, Artificial Sequence
  EN00E4-HL
caggtgcagctggtccagtcaggacctgaggtgaagaagcctggggcttcagtgaagttgtcctgcaaggcttctggatacacattcactgactatgttatacactggatgaggcaggcacctggacagcgccttgagtggatgggatatattaatccttatgatgatgatactacctacaaccagaagttcaagggccgggtcacaattactctagacacatccgccagcacagcctacatggaactcaacagcctgagatctgaggacactgcagtctattactgtgcaagaagggggaactcctatgatggttacttcgactattctatggactactggggtcaaggaaccttggtcaccgtctcctcaggtggtggtggttctggcggcggcggctccggtggtggtggttctgacatccagctgacccagtctccaaaattcatgtccacatcagtaggagacaaagtcaccatcacctgcagggccagtcagaatgtgggtactgctgtagcctggtatcaacagaaaccaggaaaagcccctaaattactgatttactcggcatcgaatcggtacactggagtccctagtcgcttctcaggcagtggatctgggacagagttcactctcaccatcagcagtctgcagcctgaagacttcgcaaattatttctgccagcaatataccaactatcccatgtatacgtttggacaggggaccaagctggaaataaaa

SEQ ID NO: 1706 - protein, 502 aa, Artificial Sequence
  EN00E4 HL x I2C HL
QVQLVQSGPEVKKPGASVKLSCKASGYTFTDYVIHWMRQAPGQRLEWMGYINPYDDDTTYNQKFKGRVTITLDTSASTAYMELNSLRSEDTAVYYCARRGNSYDGYFDYSMDYWGQGTLVTVSSGGGGSGGGGSGGGGSDIQLTQSPKFMSTSVGDKVTITCRASQNVGTAVAWYQQKPGKAPKLLIYSASNRYTGVPSRFSGSGSGTEFTLTISSLQPEDFANYFCQQYTNYPMYTFGQGTKLEIKSGGGGSEVQLVESGGGLVQPGGSLKLSCAASGFTFNKYAMNWVRQAPGKGLEWVARIRSKYNNYATYYADSVKDRFTISRDDSKNTAYLQMNNLKTEDTAVYYCVRHGNFGNSYISYWAYWGQGTLVTVSSGGGGSGGGGSGGGGSQTVVTQEPSLTVSPGGTVTLTCGSSTGAVTSGNYPNWVQQKPGQAPRGLIGGTKFLAPGTPARFSGSLLGGKAALTLSGVQPEDEAEYYCVLWYSNRWVFGGGTKLTVL

SEQ ID NO: 1707 - DNA, 1506 bp, Artificial Sequence
  EN00E4 HL x I2C HL
caggtgcagctggtccagtcaggacctgaggtgaagaagcctggggcttcagtgaagttgtcctgcaaggcttctggatacacattcactgactatgttatacactggatgaggcaggcacctggacagcgccttgagtggatgggatatattaatccttatgatgatgatactacctacaaccagaagttcaagggccgggtcacaattactctagacacatccgccagcacagcctacatggaactcaacagcctgagatctgaggacactgcagtctattactgtgcaagaagggggaactcctatgatggttacttcgactattctatggactactggggtcaaggaaccttggtcaccgtctcctcaggtggtggtggttctggcggcggcggctccggtggtggtggttctgacatccagctgacccagtctccaaaattcatgtccacatcagtaggagacaaagtcaccatcacctgcagggccagtcagaatgtgggtactgctgtagcctggtatcaacagaaaccaggaaaagcccctaaattactgatttactcggcatcgaatcggtacactggagtccctagtcgcttctcaggcagtggatctgggacagagttcactctcaccatcagcagtctgcagcctgaagacttcgcaaattatttctgccagcaatataccaactatcccatgtatacgtttggacaggggaccaagctggaaataaaatccggaggtggtggatccgaggtgcagctggtcgagtctggaggaggattggtgcagcctggagggtcattgaaactctcatgtgcagcctctggattcaccttcaataagtacgccatgaactgggtccgccaggctccaggaaagggtttggaatgggttgctcgcataagaagtaaatataataattatgcaacatattatgccgattcagtgaaagacaggttcaccatctccagagatgattcaaaaaacactgcctatctacaaatgaacaacttgaaaactgaggacactgccgtgtactactgtgtgagacatgggaacttcggtaatagctacatatcctactgggcttactggggccaagggactctggtcaccgtctcctcaggtggtggtggttctggcggcggcggctccggtggtggtggttctcagactgttgtgactcaggaaccttcactcaccgtatcacctggtggaacagtcacactcacttgtggctcctcgactggggctgttacatctggcaactacccaaactgggtccaacaaaaaccaggtcaggcaccccgtggtctaataggtgggactaagttcctcgcccccggtactcctgccagattctcaggctccctgcttggaggcaaggctgccctcaccctctcaggggtacagccagaggatgaggcagaatattactgtgttctatggtacagcaaccgctgggtgttcggtggaggaaccaaactgactgtccta

SEQ ID NO: 1708 - protein, 124 aa, Artificial Sequence
  En00F7-H
QVQLVQSGPEVKKPGASVKLSCKASGYTFTDYVIHWVKQAPGQRLEWMGYINPYDDDTTYNQKFKGQVTITVDTSASTAYMELNSLRSEDTAVYYCARRGNSYDGYFDYSMDYWGQGTLVTVSS

SEQ ID NO: 1709 - protein, 5 aa, Artificial Sequence
  EN00F7-HCDR1
DYVIH

SEQ ID NO: 1710 - protein, 17 aa, Artificial Sequence
  EN00F7-HCDR2
YINPYDDDTTYNQKFKG

SEQ ID NO: 1711 - protein, 15 aa, Artificial Sequence
  EN00F7-HCDR3
RGNSYDGYFDYSMDY

SEQ ID NO: 1712 - DNA, 372 bp, Artificial Sequence
  EN00F7-H
caggtgcagctggtccagtcaggacctgaggtgaagaagcctggggcttcagtgaagttgtcctgcaaggcttctggatacacattcactgactatgttatacactgggtgaagcaggcacctggacagcgccttgagtggatgggatatattaatccttatgatgatgatactacctacaaccagaagttcaagggccaggtcacaattactgtagacacatccgccagcacagcctacatggaactcaacagcctgagatctgaggacactgcagtctattactgtgcaagaagggggaactcctatgatggttacttcgactattctatggactactggggtcaaggaaccttggtcaccgtctcctca

SEQ ID NO: 1713 - protein, 108 aa, Artificial Sequence
  EN00F7-L
DIQLTQSPSFLSASVGDRVTITCRASQNVGTAVAWYQQKPGKAPKLLIYSASNRYTGVPSRFSGSGSGTEFTLTISSMQPEDLATYFCQQYTNYPMYTFGQGTKLEIK

SEQ ID NO: 1714 - protein, 11 aa, Artificial Sequence
  EN00F7-LCDR1
RASQNVGTAVA

SEQ ID NO: 1715 - protein, 7 aa, Artificial Sequence
  EN00F7-LCDR2
SASNRYT

SEQ ID NO: 1716 - protein, 10 aa, Artificial Sequence
  EN00F7-LCDR3
QQYTNYPMYT

SEQ ID NO: 1717 - DNA, 324 bp, Artificial Sequence
  EN00F7-L
gacatccagctgacccagtctccaagcttcctgtccgcatcagtaggagacagagtcaccatcacctgcagggccagtcagaatgtgggtactgctgtagcctggtatcaacagaaaccaggaaaagcccctaaattactgatttactcggcatcgaatcggtacactggagtccctagtcgcttctcaggcagtggatctgggacagagttcactctcaccatcagcagtatgcagcctgaagacctcgcaacttatttctgccagcaatataccaactatcccatgtatacgtttggacaggggaccaagctggaaataaaa

SEQ ID NO: 1718 - protein, 247 aa, Artificial Sequence
  EN00F7-HL
QVQLVQSGPEVKKPGASVKLSCKASGYTFTDYVIHWVKQAPGQRLEWMGYINPYDDDTTYNQKFKGQVTITVDTSASTAYMELNSLRSEDTAVYYCARRGNSYDGYFDYSMDYWGQGTLVTVSSGGGGSGGGGSGGGGSDIQLTQSPSFLSASVGDRVTITCRASQNVGTAVAWYQQKPGKAPKLLIYSASNRYTGVPSRFSGSGSGTEFTLTISSMQPEDLATYFCQQYTNYPMYTFGQGTKLEIK

SEQ ID NO: 1719 - DNA, 741 bp, Artificial Sequence
  EN00F7-HL
caggtgcagctggtccagtcaggacctgaggtgaagaagcctggggcttcagtgaagttgtcctgcaaggcttctggatacacattcactgactatgttatacactgggtgaagcaggcacctggacagcgccttgagtggatgggatatattaatccttatgatgatgatactacctacaaccagaagttcaagggccaggtcacaattactgtagacacatccgccagcacagcctacatggaactcaacagcctgagatctgaggacactgcagtctattactgtgcaagaagggggaactcctatgatggttacttcgactattctatggactactggggtcaaggaaccttggtcaccgtctcctcaggtggtggtggttctggcggcggcggctccggtggtggtggttctgacatccagctgacccagtctccaagcttcctgtccgcatcagtaggagacagagtcaccatcacctgcagggccagtcagaatgtgggtactgctgtagcctggtatcaacagaaaccaggaaaagcccctaaattactgatttactcggcatcgaatcggtacactggagtccctagtcgcttctcaggcagtggatctgggacagagttcactctcaccatcagcagtatgcagcctgaagacctcgcaacttatttctgccagcaatataccaactatcccatgtatacgtttggacaggggaccaagctggaaataaaa

SEQ ID NO: 1720 - protein, 502 aa, Artificial Sequence
  En00F7 HL x I2C HL
QVQLVQSGPEVKKPGASVKLSCKASGYTFTDYVIHWVKQAPGQRLEWMGYINPYDDDTTYNQKFKGQVTITVDTSASTAYMELNSLRSEDTAVYYCARRGNSYDGYFDYSMDYWGQGTLVTVSSGGGGSGGGGSGGGGSDIQLTQSPSFLSASVGDRVTITCRASQNVGTAVAWYQQKPGKAPKLLIYSASNRYTGVPSRFSGSGSGTEFTLTISSMQPEDLATYFCQQYTNYPMYTFGQGTKLEIKSGGGGSEVQLVESGGGLVQPGGSLKLSCAASGFTFNKYAMNWVRQAPGKGLEWVARIRSKYNNYATYYADSVKDRFTISRDDSKNTAYLQMNNLKTEDTAVYYCVRHGNFGNSYISYWAYWGQGTLVTVSSGGGGSGGGGSGGGGSQTVVTQEPSLTVSPGGTVTLTCGSSTGAVTSGNYPNWVQQKPGQAPRGLIGGTKFLAPGTPARFSGSLLGGKAALTLSGVQPEDEAEYYCVLWYSNRWVFGGGTKLTVL

SEQ ID NO: 1721 - DNA, 1506 bp, Artificial Sequence
  En00F7 HL x I2C HL
caggtgcagctggtccagtcaggacctgaggtgaagaagcctggggcttcagtgaagttgtcctgcaaggcttctggatacacattcactgactatgttatacactgggtgaagcaggcacctggacagcgccttgagtggatgggatatattaatccttatgatgatgatactacctacaaccagaagttcaagggccaggtcacaattactgtagacacatccgccagcacagcctacatggaactcaacagcctgagatctgaggacactgcagtctattactgtgcaagaagggggaactcctatgatggttacttcgactattctatggactactggggtcaaggaaccttggtcaccgtctcctcaggtggtggtggttctggcggcggcggctccggtggtggtggttctgacatccagctgacccagtctccaagcttcctgtccgcatcagtaggagacagagtcaccatcacctgcagggccagtcagaatgtgggtactgctgtagcctggtatcaacagaaaccaggaaaagcccctaaattactgatttactcggcatcgaatcggtacactggagtccctagtcgcttctcaggcagtggatctgggacagagttcactctcaccatcagcagtatgcagcctgaagacctcgcaacttatttctgccagcaatataccaactatcccatgtatacgtttggacaggggaccaagctggaaataaaatccggaggtggtggatccgaggtgcagctggtcgagtctggaggaggattggtgcagcctggagggtcattgaaactctcatgtgcagcctctggattcaccttcaataagtacgccatgaactgggtccgccaggctccaggaaagggtttggaatgggttgctcgcataagaagtaaatataataattatgcaacatattatgccgattcagtgaaagacaggttcaccatctccagagatgattcaaaaaacactgcctatctacaaatgaacaacttgaaaactgaggacactgccgtgtactactgtgtgagacatgggaacttcggtaatagctacatatcctactgggcttactggggccaagggactctggtcaccgtctcctcaggtggtggtggttctggcggcggcggctccggtggtggtggttctcagactgttgtgactcaggaaccttcactcaccgtatcacctggtggaacagtcacactcacttgtggctcctcgactggggctgttacatctggcaactacccaaactgggtccaacaaaaaccaggtcaggcaccccgtggtctaataggtgggactaagttcctcgcccccggtactcctgccagattctcaggctccctgcttggaggcaaggctgccctcaccctctcaggggtacagccagaggatgaggcagaatattactgtgttctatggtacagcaaccgctgggtgttcggtggaggaaccaaactgactgtccta

SEQ ID NO: 1722 - protein, 124 aa, Artificial Sequence
  EN00H6-H
QVQLVQSGAEVKKPGASVKLSCKASGYTFTDYVIHWVRQTPGQRLEWMGYINPYDDDTTYNQKFKGRVTITGDTSANTAYMELNSLTSEDTAVYYCARRGNSYDGYFDYSMDYWGQGTLVTVSS

SEQ ID NO: 1723 - protein, 5 aa, Artificial Sequence
  EN00H6-HCDR1
DYVIH

SEQ ID NO: 1724 - protein, 17 aa, Artificial Sequence
  EN00H6-HCDR2
YINPYDDDTTYNQKFKG

SEQ ID NO: 1725 - protein, 15 aa, Artificial Sequence
  EN00H6-HCDR3
RGNSYDGYFDYSMDY

SEQ ID NO: 1726 - DNA, 372 bp, Artificial Sequence
  EN00H6-H
caggtgcagctggtccagtcaggagctgaggtgaagaagcctggggcttcagtgaagttgtcctgcaaggcttctggatacacattcactgactatgttatacactgggtgaggcagacacctggacagcgtcttgagtggatgggatatattaatccttatgatgatgatactacctacaaccagaagttcaagggccgggtcacaattactggagacacatccgccaacacagcctacatggaactcaacagcctgacatctgaggacactgcagtctattactgtgcaagaagggggaactcctatgatggttacttcgactattctatggactactggggtcaaggaaccttggtcaccgtctcctca

SEQ ID NO: 1727 - protein, 108 aa, Artificial Sequence
  EN00H6-L
DIQLTQSPSFLSASVGDRVTITCRASQNVGTAVAWYQQKPGKAPKLLIYSASNRYTGVPSRFSGSGSGTEFTLTISSLQSEDLATYYCQQYTNYPMYTFGQGTKLEIK

SEQ ID NO: 1728 - protein, 11 aa, Artificial Sequence
  EN00H6-LCDR1
RASQNVGTAVA

SEQ ID NO: 1729 - protein, 7 aa, Artificial Sequence
  EN00H6-LCDR2
SASNRYT

SEQ ID NO: 1730 - protein, 10 aa, Artificial Sequence
  EN00H6-LCDR3
QQYTNYPMYT

SEQ ID NO: 1731 - DNA, 324 bp, Artificial Sequence
  EN00H6-L
gacatccagctgacccagtctccaagcttcctgtccgcatcagtaggagacagagtcaccatcacctgcagggccagtcagaatgtgggtactgctgtagcctggtatcaacagaaaccaggaaaagcccctaaattactgatttactcggcatcgaatcggtacactggagtccctagtcgcttctcaggcagtggatctgggacagagttcactctcaccatcagcagtctgcagtctgaagacctcgcaacttattactgccagcaatataccaactatcccatgtatacgtttggacaggggaccaagctggaaataaaa

SEQ ID NO: 1732 - protein, 247 aa, Artificial Sequence
  EN00H6-HL
QVQLVQSGAEVKKPGASVKLSCKASGYTFTDYVIHWVRQTPGQRLEWMGYINPYDDDTTYNQKFKGRVTITGDTSANTAYMELNSLTSEDTAVYYCARRGNSYDGYFDYSMDYWGQGTLVTVSSGGGGSGGGGSGGGGSDIQLTQSPSFLSASVGDRVTITCRASQNVGTAVAWYQQKPGKAPKLLIYSASNRYTGVPSRFSGSGSGTEFTLTISSLQSEDLATYYCQQYTNYPMYTFGQGTKLEIK

SEQ ID NO: 1733 - DNA, 741 bp, Artificial Sequence
  EN00H6-HL
caggtgcagctggtccagtcaggagctgaggtgaagaagcctggggcttcagtgaagttgtcctgcaaggcttctggatacacattcactgactatgttatacactgggtgaggcagacacctggacagcgtcttgagtggatgggatatattaatccttatgatgatgatactacctacaaccagaagttcaagggccgggtcacaattactggagacacatccgccaacacagcctacatggaactcaacagcctgacatctgaggacactgcagtctattactgtgcaagaagggggaactcctatgatggttacttcgactattctatggactactggggtcaaggaaccttggtcaccgtctcctcaggtggtggtggttctggcggcggcggctccggtggtggtggttctgacatccagctgacccagtctccaagcttcctgtccgcatcagtaggagacagagtcaccatcacctgcagggccagtcagaatgtgggtactgctgtagcctggtatcaacagaaaccaggaaaagcccctaaattactgatttactcggcatcgaatcggtacactggagtccctagtcgcttctcaggcagtggatctgggacagagttcactctcaccatcagcagtctgcagtctgaagacctcgcaacttattactgccagcaatataccaactatcccatgtatacgtttggacaggggaccaagctggaaataaaa

SEQ ID NO: 1734 - protein, 502 aa, Artificial Sequence
  EN00H6 HL x I2C HL
QVQLVQSGAEVKKPGASVKLSCKASGYTFTDYVIHWVRQTPGQRLEWMGYINPYDDDTTYNQKFKGRVTITGDTSANTAYMELNSLTSEDTAVYYCARRGNSYDGYFDYSMDYWGQGTLVTVSSGGGGSGGGGSGGGGSDIQLTQSPSFLSASVGDRVTITCRASQNVGTAVAWYQQKPGKAPKLLIYSASNRYTGVPSRFSGSGSGTEFTLTISSLQSEDLATYYCQQYTNYPMYTFGQGTKLEIKSGGGGSEVQLVESGGGLVQPGGSLKLSCAASGFTFNKYAMNWVRQAPGKGLEWVARIRSKYNNYATYYADSVKDRFTISRDDSKNTAYLQMNNLKTEDTAVYYCVRHGNFGNSYISYWAYWGQGTLVTVSSGGGGSGGGGSGGGGSQTVVTQEPSLTVSPGGTVTLTCGSSTGAVTSGNYPNWVQQKPGQAPRGLIGGTKFLAPGTPARFSGSLLGGKAALTLSGVQPEDEAEYYCVLWYSNRWVFGGGTKLTVL

SEQ ID NO: 1735 - DNA, 1506 bp, Artificial Sequence
  EN00H6 HL x I2C HL
caggtgcagctggtccagtcaggagctgaggtgaagaagcctggggcttcagtgaagttgtcctgcaaggcttctggatacacattcactgactatgttatacactgggtgaggcagacacctggacagcgtcttgagtggatgggatatattaatccttatgatgatgatactacctacaaccagaagttcaagggccgggtcacaattactggagacacatccgccaacacagcctacatggaactcaacagcctgacatctgaggacactgcagtctattactgtgcaagaagggggaactcctatgatggttacttcgactattctatggactactggggtcaaggaaccttggtcaccgtctcctcaggtggtggtggttctggcggcggcggctccggtggtggtggttctgacatccagctgacccagtctccaagcttcctgtccgcatcagtaggagacagagtcaccatcacctgcagggccagtcagaatgtgggtactgctgtagcctggtatcaacagaaaccaggaaaagcccctaaattactgatttactcggcatcgaatcggtacactggagtccctagtcgcttctcaggcagtggatctgggacagagttcactctcaccatcagcagtctgcagtctgaagacctcgcaacttattactgccagcaatataccaactatcccatgtatacgtttggacaggggaccaagctggaaataaaatccggaggtggtggatccgaggtgcagctggtcgagtctggaggaggattggtgcagcctggagggtcattgaaactctcatgtgcagcctctggattcaccttcaataagtacgccatgaactgggtccgccaggctccaggaaagggtttggaatgggttgctcgcataagaagtaaatataataattatgcaacatattatgccgattcagtgaaagacaggttcaccatctccagagatgattcaaaaaacactgcctatctacaaatgaacaacttgaaaactgaggacactgccgtgtactactgtgtgagacatgggaacttcggtaatagctacatatcctactgggcttactggggccaagggactctggtcaccgtctcctcaggtggtggtggttctggcggcggcggctccggtggtggtggttctcagactgttgtgactcaggaaccttcactcaccgtatcacctggtggaacagtcacactcacttgtggctcctcgactggggctgttacatctggcaactacccaaactgggtccaacaaaaaccaggtcaggcaccccgtggtctaataggtgggactaagttcctcgcccccggtactcctgccagattctcaggctccctgcttggaggcaaggctgccctcaccctctcaggggtacagccagaggatgaggcagaatattactgtgttctatggtacagcaaccgctgggtgttcggtggaggaaccaaactgactgtccta

SEQ ID NO: 1736 - protein, 119 aa, Artificial Sequence; identical to SEQ ID NO: 1015
  hEp14G6-H

SEQ ID NO: 1737 - protein, 5 aa, Artificial Sequence
  hEp14G6-HCDR1
NYWLG

SEQ ID NO: 1738 - protein, 17 aa, Artificial Sequence
  hEp14G6-HCDR2
DIFPGSGNIHYNEKFKG

SEQ ID NO: 1739 - protein, 10 aa, Artificial Sequence
  hEp14G6-HCDR3
LRNWDEPMDY

SEQ ID NO: 1740 - DNA, 357 bp, Artificial Sequence; identical to SEQ ID NO: 1019
  hEp14G6-H

SEQ ID NO: 1741 - protein, 113 aa, Artificial Sequence; identical to SEQ ID NO: 1010
  hEp14G6-L

SEQ ID NO: 1742 - protein, 17 aa, Artificial Sequence
  HEP14G6-LCDR1
KSSQSLLNSGNQKNYLT

SEQ ID NO: 1743 - protein, 7 aa, Artificial Sequence
  HEP14G6-LCDR2
WASTRES

SEQ ID NO: 1744 - protein, 9 aa, Artificial Sequence
  HEP14G6-LCDR3
QNDYSYPLT

SEQ ID NO: 1745 - DNA, 339 bp, Artificial Sequence; identical to SEQ ID NO: 1014
  HEP14G6-L

SEQ ID NO: 1746 - protein, 247 aa, Artificial Sequence
  HEP14G6-LH
DIVMTQTPLSLTVTPGEPVSISCKSSQSLLNSGNQKNYLTWYLQKPGQPPQLLIYWASTRESGVPDRFSGSGSGTDFTLKISRVQAEDVGVYYCQNDYSYPLTFGQGTKLEIKGGGGSGGGGSGGGGSQVQLVQSGAEVKKPGSSVKVSCKASGYTFSNYWLGWVRQAPGQGLEWMGDIFPGSGNIHYNEKFKGRATITADKSTSTAYMELSSLTSEDTAVYYCARLRNWDEPMDYWGQGTTVTVSS

SEQ ID NO: 1747 - DNA, 741 bp, Artificial Sequence
  HEP14G6-LH
gacatcgtgatgacacagactccactctccctgactgtgacaccaggagagccggtctctatcagctgcaagtccagtcagagtctgttaaacagtggaaatcaaaagaactacttgacctggtacctgcagaaaccagggcagcctcctcaactgttgatctactgggcatccactagggaatctggggtccctgatcgcttctcaggcagtggatctggaacagatttcactctcaaaatcagccgtgtgcaggctgaagacgtgggagtttattactgtcagaatgattatagttatccgctcacgttcggtcaagggaccaagcttgagatcaaaggtggtggtggttctggcggcggcggctccggtggtggtggttctcaggtgcagctggtccagtctggagctgaggtgaaaaagcctgggtcttcagtgaaggtatcctgcaaggcttctggatacaccttctctaactactggctaggttgggtaaggcaggcgcctggacagggacttgagtggatgggagatattttccctggaagtggtaatatccactacaatgagaagttcaagggcagagccacaatcactgcagacaaatctacgagcacagcctatatggaactcagtagcctgacatctgaggacactgctgtctattactgtgcaagactgaggaactgggacgagcctatggactactggggccaagggaccacggtcaccgtctcctcc

SEQ ID NO: 1748 - protein, 501 aa, Artificial Sequence; identical to SEQ ID NO: 1020
  hEp14G6 LH x I2C HL

SEQ ID NO: 1749 - DNA, 1503 bp, Artificial Sequence; identical to SEQ ID NO: 1021
  hEp14G6 LH x I2C HL

SEQ ID NO: 1750 - protein, 119 aa, Artificial Sequence; identical to SEQ ID NO: 967
  HEP14D2-H

SEQ ID NO: 1751 - protein, 5 aa, Artificial Sequence
  HEP14D2-HCDR1
NYWLG

SEQ ID NO: 1752 - protein, 17 aa, Artificial Sequence
  HEP14D2-HCDR2
DIFPGSGNIHYNEKFKG

SEQ ID NO: 1753 - protein, 10 aa, Artificial Sequence
  HEP14D2-HCDR3
LRNWDEPMDY

SEQ ID NO: 1754 - DNA, 357 bp, Artificial Sequence; identical to SEQ ID NO: 971
  HEP14D2-H

SEQ ID NO: 1755 - protein, 113 aa, Artificial Sequence; identical to SEQ ID NO: 962
  HEP14D2-L

SEQ ID NO: 1756 - protein, 17 aa, Artificial Sequence
  HEP14D2-LCDR1
KSSQSLLNSGNQKNYLT

SEQ ID NO: 1757 - protein, 7 aa, Artificial Sequence
  HEP14D2-LCDR2
WASTRES

SEQ ID NO: 1758 - protein, 9 aa, Artificial Sequence
  HEP14D2-LCDR3
QNDYSYPLT

SEQ ID NO: 1759 - DNA, 339 bp, Artificial Sequence; identical to SEQ ID NO: 966
  HEP14D2-L

SEQ ID NO: 1760 - protein, 247 aa, Artificial Sequence
  HEP14D2-LH
DIVMTQTPLSLPVTPGEQVSISCKSSQSLLNSGNQKNYLTWYQQKPGQSPQLLIYWASTRESGVPDRFSGSGSGTDFTLKISRVEAEDVGVYYCQNDYSYPLTFGQGTKLEIKGGGGSGGGGSGGGGSQVQLVQSGAEVKKPGSSVKVSCKASGYTFSNYWLGWVRQAPGQGLEWMGDIFPGSGNIHYNEKFKGRVTITADKSTSTAYMELSSLTSEDTAVYYCARLRNWDEPMDYWGQGTTVTVSS

SEQ ID NO: 1761 - DNA, 741 bp, Artificial Sequence
  HEP14D2-LH
gacatcgtgatgacacagactccactctccctgcctgtgacaccaggagagcaggtctctatcagctgcaagtccagtcagagtctgttaaacagtggaaatcaaaagaactacttgacctggtaccagcagaaaccagggcagtctcctcaactgttgatctactgggcatccactagggaatctggggtccctgatcgcttctcaggcagtggatctggaacagatttcactctcaaaatcagccgtgtggaggctgaagacgtgggagtttattactgtcagaatgattatagttatccgctcacgttcggtcaagggaccaagcttgagatcaaaggtggtggtggttctggcggcggcggctccggtggtggtggttctcaggtgcagctggtccagtctggagctgaggtgaaaaagcctgggtcttcagtgaaggtatcctgcaaggcttctggatacaccttctctaactactggctaggttgggtaaggcaggcgcctggacagggacttgagtggatgggagatattttccctggaagtggtaatatccactacaatgagaagttcaagggcagagtcacaatcactgcagacaaatctacgagcacagcctatatggaactcagtagcctgacatctgaggacactgctgtctattactgtgcaagactgaggaactgggacgagcctatggactactggggccaagggaccacggtcaccgtctcctcc

SEQ ID NO: 1762 - protein, 501 aa, Artificial Sequence; identical to SEQ ID NO: 972
  hEp14D2 LH x I2C HL

SEQ ID NO: 1763 - DNA, 1503 bp, Artificial Sequence; identical to SEQ ID NO: 973
  hEp14D2 LH x I2C HL

SEQ ID NO: 1764 - protein, 119 aa, Artificial Sequence; identical to SEQ ID NO: 1063
  HEP18A6-H

SEQ ID NO: 1765 - protein, 5 aa, Artificial Sequence
  HEP18A6-HCDR1
NYWLG

SEQ ID NO: 1766 - protein, 17 aa, Artificial Sequence
  HEP18A6-HCDR2
DIFPGSGNIHYNEKFKG

SEQ ID NO: 1767 - protein, 10 aa, Artificial Sequence
  HEP18A6-HCDR3
LRNWDEPMDY

SEQ ID NO: 1768 - DNA, 357 bp, Artificial Sequence; identical to SEQ ID NO: 1067
  HEP18A6-H

SEQ ID NO: 1769 - protein, 113 aa, Artificial Sequence; identical to SEQ ID NO: 1058
  HEP18A6-L

SEQ ID NO: 1770 - protein, 17 aa, Artificial Sequence
  HEP18A6-LCDR1
KSSQSLLNSGNQKNYLT

SEQ ID NO: 1771 - protein, 7 aa, Artificial Sequence
  HEP18A6-LCDR2
WASTRES

SEQ ID NO: 1772 - protein, 9 aa, Artificial Sequence
  HEP18A6-LCDR3
QNDYSYPLT

SEQ ID NO: 1773 - DNA, 339 bp, Artificial Sequence; identical to SEQ ID NO: 1062
  HEP18A6-L

SEQ ID NO: 1774 - protein, 247 aa, Artificial Sequence
  HEP18A6-LH
DIVMTQTPLSLPVTPGEQVSMSCKSSQSLLNSGNQKNYLTWYLQKPGQSPQLLIYWASTRESGVPDRFSGSGSGTDFTLNISSVEAEDVGVYYCQNDYSYPLTFGQGTKLEIKGGGGSGGGGSGGGGSQVQLVQSGAEVKKPGSSVKVSCKASGYTFSNYWLGWVRQTPGQGLEWMGDIFPGSGNIHYNEKFKGRVTITADKSTSTAYMELSSLTSEDTAVYYCARLRNWDEPMDYWGQGTTVTVSS

SEQ ID NO: 1775 - DNA, 741 bp, Artificial Sequence
  HEP18A6-LH
gacatcgtgatgacacagactccactctccctgcctgtgacaccaggagagcaggtctctatgagctgcaagtccagtcagagtctgttaaacagtggaaatcaaaagaactacttgacctggtacctgcagaaaccagggcagtctcctcaactgttgatctactgggcatccactagggaatctggggtccctgatcgcttctcaggcagtggatctggaacagatttcactctcaacatcagcagtgtggaggctgaagacgtgggagtttattactgtcagaatgattatagttatccgctcacgttcggtcaagggaccaagcttgagatcaaaggtggtggtggttctggcggcggcggctccggtggtggtggttctcaggtgcagctggtccagtctggagctgaggtgaaaaagcctgggtcttcagtgaaggtatcctgcaaggcttctggatacaccttctctaactactggctaggttgggtaaggcagacgcctggacagggacttgagtggatgggagatattttccctggaagtggtaatatccactacaatgagaagttcaagggcagagtcacaatcactgcagacaaatctacgagcacagcctatatggaactcagtagcctgacatctgaggacactgctgtctattactgtgcaagactgaggaactgggacgagcctatggactactggggccaagggaccacggtcaccgtctcctcc

SEQ ID NO: 1776 - protein, 501 aa, Artificial Sequence
  hEp18A6 LH x I2C HL
DIVMTQTPLSLPVTPGEQVSMSCKSSQSLLNSGNQKNYLTWYLQKPGQSPQLLIYWASTRESGVPDRFSGSGSGTDFTLNISSVEAEDVGVYYCQNDYSYPLTFGQGTKLEIKGGGGSGGGGSGGGGSQVQLVQSGAEVKKPGSSVKVSCKASGYTFSNYWLGWVRQTPGQGLEWMGDIFPGSGNIHYNEKFKGRVTITADKSTSTAYMELSSLTSEDTAVYYCARLRNWDEPMDYWGQGTTVTVSSGGGGSEVQLVESGGGLVQPGGSLKLSCAASGFTFNKYAMNWVRQAPGKGLEWVARIRSKYNNYATYYADSVKDRFTISRDDSKNTAYLQMNNLKTEDTAVYYCVRHGNFGNSYISYWAYWGQGTLVTVSSGGGGSGGGGSGGGGSQTVVTQEPSLTVSPGGTVTLTCGSSTGAVTSGNYPNWVQQKPGQAPRGLIGGTKFLAPGTPARFSGSLLGGKAALTLSGVQPEDEAEYYCVLWYSNRWVFGGGTKLTVL

SEQ ID NO: 1777 - DNA, 1503 bp, Artificial Sequence
  hEp18A6 LH x I2C HL
gacatcgtgatgacacagactccactctccctgcctgtgacaccaggagagcaggtctctatgagctgcaagtccagtcagagtctgttaaacagtggaaatcaaaagaactacttgacctggtacctgcagaaaccagggcagtctcctcaactgttgatctactgggcatccactagggaatctggggtccctgatcgcttctcaggcagtggatctggaacagatttcactctcaacatcagcagtgtggaggctgaagacgtgggagtttattactgtcagaatgattatagttatccgctcacgttcggtcaagggaccaagcttgagatcaaaggtggtggtggttctggcggcggcggctccggtggtggtggttctcaggtgcagctggtccagtctggagctgaggtgaaaaagcctgggtcttcagtgaaggtatcctgcaaggcttctggatacaccttctctaactactggctaggttgggtaaggcagacgcctggacagggacttgagtggatgggagatattttccctggaagtggtaatatccactacaatgagaagttcaagggcagagtcacaatcactgcagacaaatctacgagcacagcctatatggaactcagtagcctgacatctgaggacactgctgtctattactgtgcaagactgaggaactgggacgagcctatggactactggggccaagggaccacggtcaccgtctcctccggaggtggtggatccgaggtgcagctggtcgagtctggaggaggattggtgcagcctggagggtcattgaaactctcatgtgcagcctctggattcaccttcaataagtacgccatgaactgggtccgccaggctccaggaaagggtttggaatgggttgctcgcataagaagtaaatataataattatgcaacatattatgccgattcagtgaaagacaggttcaccatctccagagatgattcaaaaaacactgcctatctacaaatgaacaacttgaaaactgaggacactgccgtgtactactgtgtgagacatgggaacttcggtaatagctacatatcctactgggcttactggggccaagggactctggtcaccgtctcctcaggtggtggtggttctggcggcggcggctccggtggtggtggttctcagactgttgtgactcaggaaccttcactcaccgtatcacctggtggaacagtcacactcacttgtggctcctcgactggggctgttacatctggcaactacccaaactgggtccaacaaaaaccaggtcaggcaccccgtggtctaataggtgggactaagttcctcgcccccggtactcctgccagattctcaggctccctgcttggaggcaaggctgccctcaccctctcaggggtacagccagaggatgaggcagaatattactgtgttctatggtacagcaaccgctgggtgttcggtggaggaaccaaactgactgtccta

SEQ ID NO: 1778 - protein, 124 aa, Artificial Sequence
  FA22A9-H
QVQLVQSGAEVKKPGASVKVSCKTSGYTFTEYTIHWVRQAPGQRLEWMGGINPNNGIPNYNQKFKGRVTITIDTSSSTAYMELSSLRSEDTAVYYCARRRIAYGYDEGHAMDYWGQGTLVTVSS

SEQ ID NO: 1779 - protein, 5 aa, Artificial Sequence
  FA22A9-HCDR1
EYTIH

SEQ ID NO: 1780 - protein, 17 aa, Artificial Sequence
  FA22A9-HCDR2
GINPNNGIPNYNQKFKG

SEQ ID NO: 1781 - protein, 15 aa, Artificial Sequence
  FA22A9-HCDR3
RRIAYGYDEGHAMDY

SEQ ID NO: 1782 - DNA, 372 bp, Artificial Sequence
  FA22A9-H
caggtgcagctggtccagtctggagctgaggtgaagaagcctggggcttcagtaaaggtgtcctgcaagacttctggatacacattcactgaatacaccatacactgggtgagacaggcccctggacagagacttgagtggatgggaggtattaatcctaacaatggtattcctaactacaatcagaagttcaagggcagggtcacaataactatagacacgtcctccagcaccgcctacatggagctcagcagcctgagatctgaggatactgcggtctattactgtgcaagaagaagaatcgcctatggttacgacgagggccatgctatggactactggggtcaaggaaccctggtcaccgtctcctca

SEQ ID NO: 1783 - protein, 113 aa, Artificial Sequence
  FA22A9-L
DIVMTQTPLSLAVTVGETASMSCKSSQSLLYSRNQKNYLAWYLQKPGQSPQLLIYWASTRESGVPDRFSGSGSGTDFTLTISRVEAEDVGVYYCQQYFSYPLTFGGGTKVEIK

SEQ ID NO: 1784 - protein, 17 aa, Artificial Sequence
  FA22A9-LCDR1
KSSQSLLYSRNQKNYLA

SEQ ID NO: 1785 - protein, 7 aa, Artificial Sequence
  FA22A9-LCDR2
WASTRES

SEQ ID NO: 1786 - protein, 9 aa, Artificial Sequence
  FA22A9-LCDR3
QQYFSYPLT

SEQ ID NO: 1787 - DNA, 339 bp, Artificial Sequence
  FA22A9-L
gacatcgtgatgacacagactccactctccctagctgtgacagttggagagacggcttctatgagctgcaagtccagtcagagccttttatatagtcgtaatcaaaagaactacttggcctggtacctgcagaagccagggcagtctcctcaactgctgatttactgggcatccactagggaatctggggtccctgatcgcttctcaggcagtggatctgggacggatttcactctcacgatcagcagagtggaggctgaggacgtgggagtttattactgtcagcaatattttagctatccgctcacgttcggtggtgggaccaaggtggagatcaaa

SEQ ID NO: 1788 - protein, 252 aa, Artificial Sequence
  FA22A9-HL
QVQLVQSGAEVKKPGASVKVSCKTSGYTFTEYTIHWVRQAPGQRLEWMGGINPNNGIPNYNQKFKGRVTITIDTSSSTAYMELSSLRSEDTAVYYCARRRIAYGYDEGHAMDYWGQGTLVTVSSGGGGSGGGGSGGGGSDIVMTQTPLSLAVTVGETASMSCKSSQSLLYSRNQKNYLAWYLQKPGQSPQLLIYWASTRESGVPDRFSGSGSGTDFTLTISRVEAEDVGVYYCQQYFSYPLTFGGGTKVEIK

SEQ ID NO: 1789 - DNA, 756 bp, Artificial Sequence
  FA22A9-HL
caggtgcagctggtccagtctggagctgaggtgaagaagcctggggcttcagtaaaggtgtcctgcaagacttctggatacacattcactgaatacaccatacactgggtgagacaggcccctggacagagacttgagtggatgggaggtattaatcctaacaatggtattcctaactacaatcagaagttcaagggcagggtcacaataactatagacacgtcctccagcaccgcctacatggagctcagcagcctgagatctgaggatactgcggtctattactgtgcaagaagaagaatcgcctatggttacgacgagggccatgctatggactactggggtcaaggaaccctggtcaccgtctcctcaggtggtggtggttctggcggcggcggctccggtggtggtggttctgacatcgtgatgacacagactccactctccctagctgtgacagttggagagacggcttctatgagctgcaagtccagtcagagccttttatatagtcgtaatcaaaagaactacttggcctggtacctgcagaagccagggcagtctcctcaactgctgatttactgggcatccactagggaatctggggtccctgatcgcttctcaggcagtggatctgggacggatttcactctcacgatcagcagagtggaggctgaggacgtgggagtttattactgtcagcaatattttagctatccgctcacgttcggtggtgggaccaaggtggagatcaaa

SEQ ID NO: 1790 - protein, 507 aa, Artificial Sequence
  FA22A9 HL x I2C HL
QVQLVQSGAEVKKPGASVKVSCKTSGYTFTEYTIHWVRQAPGQRLEWMGGINPNNGIPNYNQKFKGRVTITIDTSSSTAYMELSSLRSEDTAVYYCARRRIAYGYDEGHAMDYWGQGTLVTVSSGGGGSGGGGSGGGGSDIVMTQTPLSLAVTVGETASMSCKSSQSLLYSRNQKNYLAWYLQKPGQSPQLLIYWASTRESGVPDRFSGSGSGTDFTLTISRVEAEDVGVYYCQQYFSYPLTFGGGTKVEIKSGGGGSEVQLVESGGGLVQPGGSLKLSCAASGFTFNKYAMNWVRQAPGKGLEWVARIRSKYNNYATYYADSVKDRFTISRDDSKNTAYLQMNNLKTEDTAVYYCVRHGNFGNSYISYWAYWGQGTLVTVSSGGGGSGGGGSGGGGSQTVVTQEPSLTVSPGGTVTLTCGSSTGAVTSGNYPNWVQQKPGQAPRGLIGGTKFLAPGTPARFSGSLLGGKAALTLSGVQPEDEAEYYCVLWYSNRWVFGGGTKLTVL

SEQ ID NO: 1791 - DNA, 1521 bp, Artificial Sequence
  FA22A9 HL x I2C HL
caggtgcagctggtccagtctggagctgaggtgaagaagcctggggcttcagtaaaggtgtcctgcaagacttctggatacacattcactgaatacaccatacactgggtgagacaggcccctggacagagacttgagtggatgggaggtattaatcctaacaatggtattcctaactacaatcagaagttcaagggcagggtcacaataactatagacacgtcctccagcaccgcctacatggagctcagcagcctgagatctgaggatactgcggtctattactgtgcaagaagaagaatcgcctatggttacgacgagggccatgctatggactactggggtcaaggaaccctggtcaccgtctcctcaggtggtggtggttctggcggcggcggctccggtggtggtggttctgacatcgtgatgacacagactccactctccctagctgtgacagttggagagacggcttctatgagctgcaagtccagtcagagccttttatatagtcgtaatcaaaagaactacttggcctggtacctgcagaagccagggcagtctcctcaactgctgatttactgggcatccactagggaatctggggtccctgatcgcttctcaggcagtggatctgggacggatttcactctcacgatcagcagagtggaggctgaggacgtgggagtttattactgtcagcaatattttagctatccgctcacgttcggtggtgggaccaaggtggagatcaaatccggaggtggtggatccgaggtgcagctggtcgagtctggaggaggattggtgcagcctggagggtcattgaaactctcatgtgcagcctctggattcaccttcaataagtacgccatgaactgggtccgccaggctccaggaaagggtttggaatgggttgctcgcataagaagtaaatataataattatgcaacatattatgccgattcagtgaaagacaggttcaccatctccagagatgattcaaaaaacactgcctatctacaaatgaacaacttgaaaactgaggacactgccgtgtactactgtgtgagacatgggaacttcggtaatagctacatatcctactgggcttactggggccaagggactctggtcaccgtctcctcaggtggtggtggttctggcggcggcggctccggtggtggtggttctcagactgttgtgactcaggaaccttcactcaccgtatcacctggtggaacagtcacactcacttgtggctcctcgactggggctgttacatctggcaactacccaaactgggtccaacaaaaaccaggtcaggcaccccgtggtctaataggtgggactaagttcctcgcccccggtactcctgccagattctcaggctccctgcttggaggcaaggctgccctcaccctctcaggggtacagccagaggatgaggcagaatattactgtgttctatggtacagcaaccgctgggtgttcggtggaggaaccaaactgactgtccta

SEQ ID NO: 1792 - protein, 124 aa, Artificial Sequence
  FA22C11-H
QVQLVQSGAEVKKPGASVKVSCKTSGYTFTEYTIHWVRQSPGQRLEWMGGINPNNGIPNYNQKFKGRVTITRDKSSSTAYMELSSLRSEDTAVYYCARRRIAYGYDEGHAMDYWGQGTLVTVSS

SEQ ID NO: 1793 - protein, 5 aa, Artificial Sequence
  FA22C11-HCDR1
EYTIH

SEQ ID NO: 1794 - protein, 17 aa, Artificial Sequence
  FA22C11-HCDR2
GINPNNGIPNYNQKFKG

SEQ ID NO: 1795 - protein, 15 aa, Artificial Sequence
  FA22C11-HCDR3
RRIAYGYDEGHAMDY

SEQ ID NO: 1796 - DNA, 372 bp, Artificial Sequence
  FA22C11-H
caggtgcagctggtccagtctggagctgaggtgaagaagcctggggcttcagtaaaggtgtcctgcaagacttctggatacacattcactgaatacaccatacactgggtgagacagtcccctggacagagacttgagtggatgggaggtattaatcctaacaatggtattcctaactacaatcagaagttcaagggcagggtcacaataactagagacaagtcctccagcaccgcctacatggagctcagcagcctgagatctgaggatactgcggtctattactgtgcaagaagaagaatcgcctatggttacgacgagggccatgctatggactactggggtcaaggaaccctggtcaccgtctcctca

SEQ ID NO: 1797 - protein, 113 aa, Artificial Sequence
  FA22C11-L
DIVMTQTPLSLPVTVGEPASISCKSSQSLLYSRNQKNYLAWYLQKPGQSPQLLIYWASTRESGVPDRFSGSGSGTDFTLKISRVEAEDVGIYYCQQYFSYPLTFGGGTKVEIK

SEQ ID NO: 1798 - protein, 17 aa, Artificial Sequence
  FA22C11-LCDR1
KSSQSLLYSRNQKNYLA

SEQ ID NO: 1799 - protein, 7 aa, Artificial Sequence
  FA22C11-LCDR2
WASTRES

SEQ ID NO: 1800 - protein, 9 aa, Artificial Sequence
  FA22C11-LCDR3
QQYFSYPLT

SEQ ID NO: 1801 - DNA, 339 bp, Artificial Sequence
  FA22C11-L
gacatcgtgatgacacagactccactctccctacctgtgacagttggagagccggcttctatcagctgcaagtccagtcagagccttttatatagtcgtaatcaaaagaactacttggcctggtacctgcagaagccagggcagtctcctcaactgctgatttactgggcatccactagggaatctggggtccctgatcgcttctcaggcagtggatctgggacagacttcaccctcaagatctctcgtgtggaggcggaggatgttggaatctattactgtcagcaatattttagctatccgctcacgttcggtggtgggaccaaggtggagatcaaa

SEQ ID NO: 1802 - protein, 252 aa, Artificial Sequence
  FA22C11-HL
QVQLVQSGAEVKKPGASVKVSCKTSGYTFTEYTIHWVRQSPGQRLEWMGGINPNNGIPNYNQKFKGRVTITRDKSSSTAYMELSSLRSEDTAVYYCARRRIAYGYDEGHAMDYWGQGTLVTVSSGGGGSGGGGSGGGGSDIVMTQTPLSLPVTVGEPASISCKSSQSLLYSRNQKNYLAWYLQKPGQSPQLLIYWASTRESGVPDRFSGSGSGTDFTLKISRVEAEDVGIYYCQQYFSYPLTFGGGTKVEIK

SEQ ID NO: 1803 - DNA, 756 bp, Artificial Sequence
  FA22C11-HL
caggtgcagctggtccagtctggagctgaggtgaagaagcctggggcttcagtaaaggtgtcctgcaagacttctggatacacattcactgaatacaccatacactgggtgagacagtcccctggacagagacttgagtggatgggaggtattaatcctaacaatggtattcctaactacaatcagaagttcaagggcagggtcacaataactagagacaagtcctccagcaccgcctacatggagctcagcagcctgagatctgaggatactgcggtctattactgtgcaagaagaagaatcgcctatggttacgacgagggccatgctatggactactggggtcaaggaaccctggtcaccgtctcctcaggtggtggtggttctggcggcggcggctccggtggtggtggttctgacatcgtgatgacacagactccactctccctacctgtgacagttggagagccggcttctatcagctgcaagtccagtcagagccttttatatagtcgtaatcaaaagaactacttggcctggtacctgcagaagccagggcagtctcctcaactgctgatttactgggcatccactagggaatctggggtccctgatcgcttctcaggcagtggatctgggacagacttcaccctcaagatctctcgtgtggaggcggaggatgttggaatctattactgtcagcaatattttagctatccgctcacgttcggtggtgggaccaaggtggagatcaaa

SEQ ID NO: 1804 - protein, 507 aa, Artificial Sequence
  FA22C11 HL x I2C HL
QVQLVQSGAEVKKPGASVKVSCKTSGYTFTEYTIHWVRQSPGQRLEWMGGINPNNGIPNYNQKFKGRVTITRDKSSSTAYMELSSLRSEDTAVYYCARRRIAYGYDEGHAMDYWGQGTLVTVSSGGGGSGGGGSGGGGSDIVMTQTPLSLPVTVGEPASISCKSSQSLLYSRNQKNYLAWYLQKPGQSPQLLIYWASTRESGVPDRFSGSGSGTDFTLKISRVEAEDVGIYYCQQYFSYPLTFGGGTKVEIKSGGGGSEVQLVESGGGLVQPGGSLKLSCAASGFTFNKYAMNWVRQAPGKGLEWVARIRSKYNNYATYYADSVKDRFTISRDDSKNTAYLQMNNLKTEDTAVYYCVRHGNFGNSYISYWAYWGQGTLVTVSSGGGGSGGGGSGGGGSQTVVTQEPSLTVSPGGTVTLTCGSSTGAVTSGNYPNWVQQKPGQAPRGLIGGTKFLAPGTPARFSGSLLGGKAALTLSGVQPEDEAEYYCVLWYSNRWVFGGGTKLTVL

SEQ ID NO: 1805 - DNA, 1521 bp, Artificial Sequence
  FA22C11 HL x I2C HL
caggtgcagctggtccagtctggagctgaggtgaagaagcctggggcttcagtaaaggtgtcctgcaagacttctggatacacattcactgaatacaccatacactgggtgagacagtcccctggacagagacttgagtggatgggaggtattaatcctaacaatggtattcctaactacaatcagaagttcaagggcagggtcacaataactagagacaagtcctccagcaccgcctacatggagctcagcagcctgagatctgaggatactgcggtctattactgtgcaagaagaagaatcgcctatggttacgacgagggccatgctatggactactggggtcaaggaaccctggtcaccgtctcctcaggtggtggtggttctggcggcggcggctccggtggtggtggttctgacatcgtgatgacacagactccactctccctacctgtgacagttggagagccggcttctatcagctgcaagtccagtcagagccttttatatagtcgtaatcaaaagaactacttggcctggtacctgcagaagccagggcagtctcctcaactgctgatttactgggcatccactagggaatctggggtccctgatcgcttctcaggcagtggatctgggacagacttcaccctcaagatctctcgtgtggaggcggaggatgttggaatctattactgtcagcaatattttagctatccgctcacgttcggtggtgggaccaaggtggagatcaaatccggaggtggtggatccgaggtgcagctggtcgagtctggaggaggattggtgcagcctggagggtcattgaaactctcatgtgcagcctctggattcaccttcaataagtacgccatgaactgggtccgccaggctccaggaaagggtttggaatgggttgctcgcataagaagtaaatataataattatgcaacatattatgccgattcagtgaaagacaggttcaccatctccagagatgattcaaaaaacactgcctatctacaaatgaacaacttgaaaactgaggacactgccgtgtactactgtgtgagacatgggaacttcggtaatagctacatatcctactgggcttactggggccaagggactctggtcaccgtctcctcaggtggtggtggttctggcggcggcggctccggtggtggtggttctcagactgttgtgactcaggaaccttcactcaccgtatcacctggtggaacagtcacactcacttgtggctcctcgactggggctgttacatctggcaactacccaaactgggtccaacaaaaaccaggtcaggcaccccgtggtctaataggtgggactaagttcctcgcccccggtactcctgccagattctcaggctccctgcttggaggcaaggctgccctcaccctctcaggggtacagccagaggatgaggcagaatattactgtgttctatggtacagcaaccgctgggtgttcggtggaggaaccaaactgactgtccta

SEQ ID NO: 1806 - protein, 124 aa, Artificial Sequence
  FA22D8-H
QVQLVQSGAEVEKPGASVKVSCKASGYTFTEYTIHWVRQAPGQRLEWMGGINPNNGIPNYNQKFKGRATITIDTSSSTAYMELSSLTSEDTAVYYCARRRIAYGYDEGHAMDYWGQGTLVTVSS

SEQ ID NO: 1807 - protein, 5 aa, Artificial Sequence
  FA22D8-HCDR1
EYTIH

SEQ ID NO: 1808 - protein, 17 aa, Artificial Sequence
  FA22D8-HCDR2
GINPNNGIPNYNQKFKG

SEQ ID NO: 1809 - protein, 15 aa, Artificial Sequence
  FA22D8-HCDR3
RRIAYGYDEGHAMDY

SEQ ID NO: 1810 - DNA, 372 bp, Artificial Sequence
  FA22D8-H
caggtgcagctggtccagtctggagctgaggtggagaagcctggggcttcagtaaaggtgtcctgcaaggcttctggatacacattcactgaatacaccatacactgggtgagacaggcccctggacagagacttgagtggatgggaggtattaatcctaacaatggtattcctaactacaatcagaagttcaagggcagggccacaataactatagacacgtcctccagcaccgcctacatggagctcagcagcctgacatctgaggatactgcggtctattactgtgcaagaagaagaatcgcctatggttacgacgagggccatgctatggactactggggtcaaggaaccctggtcaccgtctcctca

SEQ ID NO: 1811 - protein, 113 aa, Artificial Sequence
  FA22D8-L
DIVMTQTPLSLPVTVGEQASISCKSSQSLLYSRNQKNYLAWYLQKPGQSPKLLIYWASTRESGVPDRFSGSGSGTDFTLKISSVEAEDVGVYYCQQYFSYPLTFGGGTKVEIK

SEQ ID NO: 1812 - protein, 17 aa, Artificial Sequence
  FA22D8-LCDR1
KSSQSLLYSRNQKNYLA

SEQ ID NO: 1813 - protein, 7 aa, Artificial Sequence
  FA22D8-LCDR2
WASTRES

SEQ ID NO: 1814 - protein, 9 aa, Artificial Sequence
  FA22D8-LCDR3
QQYFSYPLT

SEQ ID NO: 1815 - DNA, 339 bp, Artificial Sequence
  FA22D8-L
gacatcgtgatgacacagactccactctccctacctgtgacagttggagagcaggcttctatcagctgcaagtccagtcagagccttttatatagtcgtaatcaaaagaactacttggcctggtacctgcagaagccagggcagtctcctaaactgctgatttactgggcatccactagggaatctggggtccctgatcgcttctcaggcagtggatctgggacggatttcactctcaagatcagcagtgtggaggctgaggatgttggagtctattactgtcagcaatattttagctatccgctcacgttcggtggtgggaccaaggtggagatcaaa

SEQ ID NO: 1816 - protein, 252 aa, Artificial Sequence
  FA22D8-HL
QVQLVQSGAEVEKPGASVKVSCKASGYTFTEYTIHWVRQAPGQRLEWMGGINPNNGIPNYNQKFKGRATITIDTSSSTAYMELSSLTSEDTAVYYCARRRIAYGYDEGHAMDYWGQGTLVTVSSGGGGSGGGGSGGGGSDIVMTQTPLSLPVTVGEQASISCKSSQSLLYSRNQKNYLAWYLQKPGQSPKLLIYWASTRESGVPDRFSGSGSGTDFTLKISSVEAEDVGVYYCQQYFSYPLTFGGGTKVEIK

SEQ ID NO: 1817 - DNA, 756 bp, Artificial Sequence
  FA22D8-HL
caggtgcagctggtccagtctggagctgaggtggagaagcctggggcttcagtaaaggtgtcctgcaaggcttctggatacacattcactgaatacaccatacactgggtgagacaggcccctggacagagacttgagtggatgggaggtattaatcctaacaatggtattcctaactacaatcagaagttcaagggcagggccacaataactatagacacgtcctccagcaccgcctacatggagctcagcagcctgacatctgaggatactgcggtctattactgtgcaagaagaagaatcgcctatggttacgacgagggccatgctatggactactggggtcaaggaaccctggtcaccgtctcctcaggtggtggtggttctggcggcggcggctccggtggtggtggttctgacatcgtgatgacacagactccactctccctacctgtgacagttggagagcaggcttctatcagctgcaagtccagtcagagccttttatatagtcgtaatcaaaagaactacttggcctggtacctgcagaagccagggcagtctcctaaactgctgatttactgggcatccactagggaatctggggtccctgatcgcttctcaggcagtggatctgggacggatttcactctcaagatcagcagtgtggaggctgaggatgttggagtctattactgtcagcaatattttagctatccgctcacgttcggtggtgggaccaaggtggagatcaaa

SEQ ID NO: 1818 - protein, 507 aa, Artificial Sequence
  FA22D8 HL x I2C HL
QVQLVQSGAEVEKPGASVKVSCKASGYTFTEYTIHWVRQAPGQRLEWMGGINPNNGIPNYNQKFKGRATITIDTSSSTAYMELSSLTSEDTAVYYCARRRIAYGYDEGHAMDYWGQGTLVTVSSGGGGSGGGGSGGGGSDIVMTQTPLSLPVTVGEQASISCKSSQSLLYSRNQKNYLAWYLQKPGQSPKLLIYWASTRESGVPDRFSGSGSGTDFTLKISSVEAEDVGVYYCQQYFSYPLTFGGGTKVEIKSGGGGSEVQLVESGGGLVQPGGSLKLSCAASGFTFNKYAMNWVRQAPGKGLEWVARIRSKYNNYATYYADSVKDRFTISRDDSKNTAYLQMNNLKTEDTAVYYCVRHGNFGNSYISYWAYWGQGTLVTVSSGGGGSGGGGSGGGGSQTVVTQEPSLTVSPGGTVTLTCGSSTGAVTSGNYPNWVQQKPGQAPRGLIGGTKFLAPGTPARFSGSLLGGKAALTLSGVQPEDEAEYYCVLWYSNRWVFGGGTKLTVL

SEQ ID NO: 1819 - DNA, 1521 bp, Artificial Sequence
  FA22D8 HL x I2C HL
caggtgcagctggtccagtctggagctgaggtggagaagcctggggcttcagtaaaggtgtcctgcaaggcttctggatacacattcactgaatacaccatacactgggtgagacaggcccctggacagagacttgagtggatgggaggtattaatcctaacaatggtattcctaactacaatcagaagttcaagggcagggccacaataactatagacacgtcctccagcaccgcctacatggagctcagcagcctgacatctgaggatactgcggtctattactgtgcaagaagaagaatcgcctatggttacgacgagggccatgctatggactactggggtcaaggaaccctggtcaccgtctcctcaggtggtggtggttctggcggcggcggctccggtggtggtggttctgacatcgtgatgacacagactccactctccctacctgtgacagttggagagcaggcttctatcagctgcaagtccagtcagagccttttatatagtcgtaatcaaaagaactacttggcctggtacctgcagaagccagggcagtctcctaaactgctgatttactgggcatccactagggaatctggggtccctgatcgcttctcaggcagtggatctgggacggatttcactctcaagatcagcagtgtggaggctgaggatgttggagtctattactgtcagcaatattttagctatccgctcacgttcggtggtgggaccaaggtggagatcaaatccggaggtggtggatccgaggtgcagctggtcgagtctggaggaggattggtgcagcctggagggtcattgaaactctcatgtgcagcctctggattcaccttcaataagtacgccatgaactgggtccgccaggctccaggaaagggtttggaatgggttgctcgcataagaagtaaatataataattatgcaacatattatgccgattcagtgaaagacaggttcaccatctccagagatgattcaaaaaacactgcctatctacaaatgaacaacttgaaaactgaggacactgccgtgtactactgtgtgagacatgggaacttcggtaatagctacatatcctactgggcttactggggccaagggactctggtcaccgtctcctcaggtggtggtggttctggcggcggcggctccggtggtggtggttctcagactgttgtgactcaggaaccttcactcaccgtatcacctggtggaacagtcacactcacttgtggctcctcgactggggctgttacatctggcaactacccaaactgggtccaacaaaaaccaggtcaggcaccccgtggtctaataggtgggactaagttcctcgcccccggtactcctgccagattctcaggctccctgcttggaggcaaggctgccctcaccctctcaggggtacagccagaggatgaggcagaatattactgtgttctatggtacagcaaccgctgggtgttcggtggaggaaccaaactgactgtccta

SEQ ID NO: 1820 - protein, 124 aa, Artificial Sequence
  FA22E8-H
QVQLVQSGAELVKPGASVKVSCKASGYTFTEYTIHWVRQAPGQRLEWMGGINPNNGIPNYNQKFKGRATITIDTSASTAYMELRSLRSEDTAVYYCARRRIAYGYDEGHAMDYWGQGTLVTVSS

SEQ ID NO: 1821 - protein, 5 aa, Artificial Sequence
  FA22E8-HCDR1
EYTIH

SEQ ID NO: 1822 - protein, 17 aa, Artificial Sequence
  FA22E8-HCDR2
GINPNNGIPNYNQKFKG

SEQ ID NO: 1823 - protein, 15 aa, Artificial Sequence
  FA22E8-HCDR3
RRIAYGYDEGHAMDY

SEQ ID NO: 1824 - DNA, 372 bp, Artificial Sequence
  FA22E8-H
caggtgcagctggtccagtctggagctgagctggtgaagcctggggcttcagtaaaggtgtcctgcaaggcttctggatacacattcactgaatacaccatacactgggtgagacaggcccctggacagagacttgagtggatgggaggtattaatcctaacaatggtattcctaactacaatcagaagttcaagggcagggccacaataactatagacacgtccgccagcaccgcctacatggagctccgcagcctgagatctgaggatactgcggtctattactgtgcaagaagaagaatcgcctatggttacgacgagggccatgctatggactactggggtcaaggaaccctggtcaccgtctcctca

SEQ ID NO: 1825 - protein, 113 aa, Artificial Sequence
  FA22E8-L
DIVMTQTPLSLAVTPGEQASISCKSSQSLLYSRNQKNYLAWYLQKPGQSPQLLIYWASTRESGVPDRFSGSGFGTDFTLKISGVEAEDVGVYYCQQYFSYPLTFGGGTKVEIK

SEQ ID NO: 1826 - protein, 17 aa, Artificial Sequence
  FA22E8-LCDR1
KSSQSLLYSRNQKNYLA

SEQ ID NO: 1827 - protein, 7 aa, Artificial Sequence
  FA22E8-LCDR2
WASTRES

SEQ ID NO: 1828 - protein, 9 aa, Artificial Sequence
  FA22E8-LCDR3
QQYFSYPLT

SEQ ID NO: 1829 - DNA, 339 bp, Artificial Sequence
  FA22E8-L
gacatcgtgatgacacagactccactctccctagctgtgacacctggagagcaggcttctatcagctgcaagtccagtcagagccttttatatagtcgtaatcaaaagaactacttggcctggtacctgcagaagccagggcagtctcctcaactgctgatttactgggcatccactagggaatctggggtccctgatcgcttctcaggcagtggatttgggacggatttcactctcaagatcagcggagtggaggctgaggacgtgggagtttattactgtcagcaatattttagctatccgctcacgttcggtggtgggaccaaggtggagatcaaa

SEQ ID NO: 1830 - protein, 252 aa, Artificial Sequence
  FA22E8-HL
QVQLVQSGAELVKPGASVKVSCKASGYTFTEYTIHWVRQAPGQRLEWMGGINPNNGIPNYNQKFKGRATITIDTSASTAYMELRSLRSEDTAVYYCARRRIAYGYDEGHAMDYWGQGTLVTVSSGGGGSGGGGSGGGGSDIVMTQTPLSLAVTPGEQASISCKSSQSLLYSRNQKNYLAWYLQKPGQSPQLLIYWASTRESGVPDRFSGSGFGTDFTLKISGVEAEDVGVYYCQQYFSYPLTFGGGTKVEIK

SEQ ID NO: 1831 - DNA, 756 bp, Artificial Sequence
  FA22E8-HL
caggtgcagctggtccagtctggagctgagctggtgaagcctggggcttcagtaaaggtgtcctgcaaggcttctggatacacattcactgaatacaccatacactgggtgagacaggcccctggacagagacttgagtggatgggaggtattaatcctaacaatggtattcctaactacaatcagaagttcaagggcagggccacaataactatagacacgtccgccagcaccgcctacatggagctccgcagcctgagatctgaggatactgcggtctattactgtgcaagaagaagaatcgcctatggttacgacgagggccatgctatggactactggggtcaaggaaccctggtcaccgtctcctcaggtggtggtggttctggcggcggcggctccggtggtggtggttctgacatcgtgatgacacagactccactctccctagctgtgacacctggagagcaggcttctatcagctgcaagtccagtcagagccttttatatagtcgtaatcaaaagaactacttggcctggtacctgcagaagccagggcagtctcctcaactgctgatttactgggcatccactagggaatctggggtccctgatcgcttctcaggcagtggatttgggacggatttcactctcaagatcagcggagtggaggctgaggacgtgggagtttattactgtcagcaatattttagctatccgctcacgttcggtggtgggaccaaggtggagatcaaa

SEQ ID NO: 1832 - protein, 507 aa, Artificial Sequence
  FA22E8 HL x I2C HL
QVQLVQSGAELVKPGASVKVSCKASGYTFTEYTIHWVRQAPGQRLEWMGGINPNNGIPNYNQKFKGRATITIDTSASTAYMELRSLRSEDTAVYYCARRRIAYGYDEGHAMDYWGQGTLVTVSSGGGGSGGGGSGGGGSDIVMTQTPLSLAVTPGEQASISCKSSQSLLYSRNQKNYLAWYLQKPGQSPQLLIYWASTRESGVPDRFSGSGFGTDFTLKISGVEAEDVGVYYCQQYFSYPLTFGGGTKVEIKSGGGGSEVQLVESGGGLVQPGGSLKLSCAASGFTFNKYAMNWVRQAPGKGLEWVARIRSKYNNYATYYADSVKDRFTISRDDSKNTAYLQMNNLKTEDTAVYYCVRHGNFGNSYISYWAYWGQGTLVTVSSGGGGSGGGGSGGGGSQTVVTQEPSLTVSPGGTVTLTCGSSTGAVTSGNYPNWVQQKPGQAPRGLIGGTKFLAPGTPARFSGSLLGGKAALTLSGVQPEDEAEYYCVLWYSNRWVFGGGTKLTVL

SEQ ID NO: 1833 - DNA, 1521 bp, Artificial Sequence
  FA22E8 HL x I2C HL
caggtgcagctggtccagtctggagctgagctggtgaagcctggggcttcagtaaaggtgtcctgcaaggcttctggatacacattcactgaatacaccatacactgggtgagacaggcccctggacagagacttgagtggatgggaggtattaatcctaacaatggtattcctaactacaatcagaagttcaagggcagggccacaataactatagacacgtccgccagcaccgcctacatggagctccgcagcctgagatctgaggatactgcggtctattactgtgcaagaagaagaatcgcctatggttacgacgagggccatgctatggactactggggtcaaggaaccctggtcaccgtctcctcaggtggtggtggttctggcggcggcggctccggtggtggtggttctgacatcgtgatgacacagactccactctccctagctgtgacacctggagagcaggcttctatcagctgcaagtccagtcagagccttttatatagtcgtaatcaaaagaactacttggcctggtacctgcagaagccagggcagtctcctcaactgctgatttactgggcatccactagggaatctggggtccctgatcgcttctcaggcagtggatttgggacggatttcactctcaagatcagcggagtggaggctgaggacgtgggagtttattactgtcagcaatattttagctatccgctcacgttcggtggtgggaccaaggtggagatcaaatccggaggtggtggatccgaggtgcagctggtcgagtctggaggaggattggtgcagcctggagggtcattgaaactctcatgtgcagcctctggattcaccttcaataagtacgccatgaactgggtccgccaggctccaggaaagggtttggaatgggttgctcgcataagaagtaaatataataattatgcaacatattatgccgattcagtgaaagacaggttcaccatctccagagatgattcaaaaaacactgcctatctacaaatgaacaacttgaaaactgaggacactgccgtgtactactgtgtgagacatgggaacttcggtaatagctacatatcctactgggcttactggggccaagggactctggtcaccgtctcctcaggtggtggtggttctggcggcggcggctccggtggtggtggttctcagactgttgtgactcaggaaccttcactcaccgtatcacctggtggaacagtcacactcacttgtggctcctcgactggggctgttacatctggcaactacccaaactgggtccaacaaaaaccaggtcaggcaccccgtggtctaataggtgggactaagttcctcgcccccggtactcctgccagattctcaggctccctgcttggaggcaaggctgccctcaccctctcaggggtacagccagaggatgaggcagaatattactgtgttctatggtacagcaaccgctgggtgttcggtggaggaaccaaactgactgtccta

SEQ ID NO: 1834 - protein, 124 aa, Artificial Sequence
  FA20H3-H
QVQLVQSGAEVKKPGASVKMSCKTSGYTFTEYTIHWVRQAPGQRLEWMGGINPNNGIPNYNQKFKGRATITRDTSSSTAYMELSSLRSEDTAVYYCARRRIAYGYDEGHAMDYWGQGTLVTVSS

SEQ ID NO: 1835 - protein, 5 aa, Artificial Sequence
  FA20H3-HCDR1
EYTIH

SEQ ID NO: 1836 - protein, 17 aa, Artificial Sequence
  FA20H3-HCDR2
GINPNNGIPNYNQKFKG

SEQ ID NO: 1837 - protein, 15 aa, Artificial Sequence
  FA20H3-HCDR3
RRIAYGYDEGHAMDY

SEQ ID NO: 1838 - DNA, 372 bp, Artificial Sequence
  FA20H3-H
caggtgcagctggtccagtctggagctgaggtgaagaagcctggggcttcagtaaagatgtcctgcaagacttctggatacacattcactgaatacaccatacactgggtgagacaggcccctggacagagacttgagtggatgggaggtattaatcctaacaatggtattcctaactacaatcagaagttcaagggcagggccacaataactagagacacgtcctccagcaccgcctacatggagctcagcagcctgagatctgaggatactgcggtctattactgtgcaagaagaagaatcgcctatggttacgacgagggccatgctatggactactggggtcaaggaaccctggtcaccgtctcctca

SEQ ID NO: 1839 - protein, 113 aa, Artificial Sequence
  FA20H3-L
DIVMTQTPFSLPVTPGEPASISCKSSQSLLYSRNQKNYLAWYQQKPGQSPQLLIYWASTRESGVPDRFSGSGSGTDFTLNISRVEAEDVGVYYCQQYFSYPLTFGGGTKVEIK

SEQ ID NO: 1840 - protein, 17 aa, Artificial Sequence
  FA20H3-LCDR1
KSSQSLLYSRNQKNYLA

SEQ ID NO: 1841 - protein, 7 aa, Artificial Sequence
  FA20H3-LCDR2
WASTRES

SEQ ID NO: 1842 - protein, 9 aa, Artificial Sequence
  FA20H3-LCDR3
QQYFSYPLT

SEQ ID NO: 1843 - DNA, 339 bp, Artificial Sequence
  FA20H3-L
gacatcgtgatgacacagactccattctccctacctgtgacacctggagagccggcttctatcagctgcaagtccagtcagagccttttatatagtcgtaatcaaaagaactacttggcctggtaccagcagaagccagggcagtctcctcaactgctgatttactgggcatccactagggaatctggggtccctgatcgcttctcaggcagtggatctgggacagacttcaccctcaatatctctcgtgtggaggcggaggatgttggagtctattactgtcagcaatattttagctatccgctcacgttcggtggtgggaccaaggtggagatcaaa

SEQ ID NO: 1844 - protein, 252 aa, Artificial Sequence
  FA20H3-HL
QVQLVQSGAEVKKPGASVKMSCKTSGYTFTEYTIHWVRQAPGQRLEWMGGINPNNGIPNYNQKFKGRATITRDTSSSTAYMELSSLRSEDTAVYYCARRRIAYGYDEGHAMDYWGQGTLVTVSSGGGGSGGGGSGGGGSDIVMTQTPFSLPVTPGEPASISCKSSQSLLYSRNQKNYLAWYQQKPGQSPQLLIYWASTRESGVPDRFSGSGSGTDFTLNISRVEAEDVGVYYCQQYFSYPLTFGGGTKVEIK

SEQ ID NO: 1845 - DNA, 756 bp, Artificial Sequence
  FA20H3-HL
caggtgcagctggtccagtctggagctgaggtgaagaagcctggggcttcagtaaagatgtcctgcaagacttctggatacacattcactgaatacaccatacactgggtgagacaggcccctggacagagacttgagtggatgggaggtattaatcctaacaatggtattcctaactacaatcagaagttcaagggcagggccacaataactagagacacgtcctccagcaccgcctacatggagctcagcagcctgagatctgaggatactgcggtctattactgtgcaagaagaagaatcgcctatggttacgacgagggccatgctatggactactggggtcaaggaaccctggtcaccgtctcctcaggtggtggtggttctggcggcggcggctccggtggtggtggttctgacatcgtgatgacacagactccattctccctacctgtgacacctggagagccggcttctatcagctgcaagtccagtcagagccttttatatagtcgtaatcaaaagaactacttggcctggtaccagcagaagccagggcagtctcctcaactgctgatttactgggcatccactagggaatctggggtccctgatcgcttctcaggcagtggatctgggacagacttcaccctcaatatctctcgtgtggaggcggaggatgttggagtctattactgtcagcaatattttagctatccgctcacgttcggtggtgggaccaaggtggagatcaaa

SEQ ID NO: 1846 - protein, 507 aa, Artificial Sequence
  FA20H3 HL x I2C HL
QVQLVQSGAEVKKPGASVKMSCKTSGYTFTEYTIHWVRQAPGQRLEWMGGINPNNGIPNYNQKFKGRATITRDTSSSTAYMELSSLRSEDTAVYYCARRRIAYGYDEGHAMDYWGQGTLVTVSSGGGGSGGGGSGGGGSDIVMTQTPFSLPVTPGEPASISCKSSQSLLYSRNQKNYLAWYQQKPGQSPQLLIYWASTRESGVPDRFSGSGSGTDFTLNISRVEAEDVGVYYCQQYFSYPLTFGGGTKVEIKSGGGGSEVQLVESGGGLVQPGGSLKLSCAASGFTFNKYAMNWVRQAPGKGLEWVARIRSKYNNYATYYADSVKDRFTISRDDSKNTAYLQMNNLKTEDTAVYYCVRHGNFGNSYISYWAYWGQGTLVTVSSGGGGSGGGGSGGGGSQTVVTQEPSLTVSPGGTVTLTCGSSTGAVTSGNYPNWVQQKPGQAPRGLIGGTKFLAPGTPARFSGSLLGGKAALTLSGVQPEDEAEYYCVLWYSNRWVFGGGTKLTVL

SEQ ID NO: 1847 - DNA, 1521 bp, Artificial Sequence
  FA20H3 HL x I2C HL
caggtgcagctggtccagtctggagctgaggtgaagaagcctggggcttcagtaaagatgtcctgcaagacttctggatacacattcactgaatacaccatacactgggtgagacaggcccctggacagagacttgagtggatgggaggtattaatcctaacaatggtattcctaactacaatcagaagttcaagggcagggccacaataactagagacacgtcctccagcaccgcctacatggagctcagcagcctgagatctgaggatactgcggtctattactgtgcaagaagaagaatcgcctatggttacgacgagggccatgctatggactactggggtcaaggaaccctggtcaccgtctcctcaggtggtggtggttctggcggcggcggctccggtggtggtggttctgacatcgtgatgacacagactccattctccctacctgtgacacctggagagccggcttctatcagctgcaagtccagtcagagccttttatatagtcgtaatcaaaagaactacttggcctggtaccagcagaagccagggcagtctcctcaactgctgatttactgggcatccactagggaatctggggtccctgatcgcttctcaggcagtggatctgggacagacttcaccctcaatatctctcgtgtggaggcggaggatgttggagtctattactgtcagcaatattttagctatccgctcacgttcggtggtgggaccaaggtggagatcaaatccggaggtggtggatccgaggtgcagctggtcgagtctggaggaggattggtgcagcctggagggtcattgaaactctcatgtgcagcctctggattcaccttcaataagtacgccatgaactgggtccgccaggctccaggaaagggtttggaatgggttgctcgcataagaagtaaatataataattatgcaacatattatgccgattcagtgaaagacaggttcaccatctccagagatgattcaaaaaacactgcctatctacaaatgaacaacttgaaaactgaggacactgccgtgtactactgtgtgagacatgggaacttcggtaatagctacatatcctactgggcttactggggccaagggactctggtcaccgtctcctcaggtggtggtggttctggcggcggcggctccggtggtggtggttctcagactgttgtgactcaggaaccttcactcaccgtatcacctggtggaacagtcacactcacttgtggctcctcgactggggctgttacatctggcaactacccaaactgggtccaacaaaaaccaggtcaggcaccccgtggtctaataggtgggactaagttcctcgcccccggtactcctgccagattctcaggctccctgcttggaggcaaggctgccctcaccctctcaggggtacagccagaggatgaggcagaatattactgtgttctatggtacagcaaccgctgggtgttcggtggaggaaccaaactgactgtccta

SEQ ID NO: 1848 - protein, 124 aa, Artificial Sequence
  FA19D12-H
QVQLVQSGAEVKKPGASVKVSCKASGYTFTEYTIHWVRQAHGQSLEWMGGINPNNGIPNYNQKFKGRVTITVDTSASTAYMELRSLRSEDTAVYYCARRRIAYGYDEGHAMDYWGQGTLVTVSS

SEQ ID NO: 1849 - protein, 5 aa, Artificial Sequence
  FA19D12-HCDR1
EYTIH

SEQ ID NO: 1850 - protein, 17 aa, Artificial Sequence
  FA19D12-HCDR2
GINPNNGIPNYNQKFKG

SEQ ID NO: 1851 - protein, 15 aa, Artificial Sequence
  FA19D12-HCDR3
RRIAYGYDEGHAMDY

SEQ ID NO: 1852 - DNA, 417 bp, Artificial Sequence
  FA19D12-H
caggtgcagctggtccagtctggagctgaggtgaagaagcctggggcttcagtaaaggtgtcctgcaaggcttctggatacacattcactgaatacaccatacactgggtgagacaggcccatggacagagccttgagtggatgggaggtattaatcctaacaatggtattcctaactacaatcagaagttcaagggcagggtcacaataactgtagacacgtccgccagcaccgcctacatggagctccgcagcctgagatctgaggatactgcggtctattactgtgcaagaagaagaatcgcctatggttacgacgagggccatgctatggactactggggtcaaggaaccctggtcaccgtctcctcaggtggtggtggttctggcggcggcggctccggtggtggtggttct

SEQ ID NO: 1853 - protein, 113 aa, Artificial Sequence
  FA19D12-L
DIVMTQTPFSLPVTPGEPASISCKSSQSLLYSRNQKNYLAWYQQKPGQSPKLLIYWASTRESGVPDRFSGSGSGTDFTLKISRVEAEDVGVYYCQQYFSYPLTFGGGTKVEIK

SEQ ID NO: 1854 - protein, 17 aa, Artificial Sequence
  FA19D12-LCDR1
KSSQSLLYSRNQKNYLA

SEQ ID NO: 1855 - protein, 7 aa, Artificial Sequence
  FA19D12-LCDR2
WASTRES

SEQ ID NO: 1856 - protein, 9 aa, Artificial Sequence
  FA19D12-LCDR3
QQYFSYPLT

SEQ ID NO: 1857 - DNA, 339 bp, Artificial Sequence
  FA19D12-L
gacatcgtgatgacacagactccattctccctacctgtgacacctggagagccggcttctatcagctgcaagtccagtcagagccttttatatagtcgtaatcaaaagaactacttggcctggtaccagcagaagccagggcagtctcctaaactgctgatttactgggcatccactagggaatctggggtccctgatcgcttctcaggcagtggatctgggacggatttcactctcaaaatctccagagtggaggctgaggacgtgggagtttattactgtcagcaatattttagctatccgctcacgttcggtggtgggaccaaggtggagatcaaa

SEQ ID NO: 1858 - protein, 252 aa, Artificial Sequence
  FA19D12-HL
QVQLVQSGAEVKKPGASVKVSCKASGYTFTEYTIHWVRQAHGQSLEWMGGINPNNGIPNYNQKFKGRVTITVDTSASTAYMELRSLRSEDTAVYYCARRRIAYGYDEGHAMDYWGQGTLVTVSSGGGGSGGGGSGGGGSDIVMTQTPFSLPVTPGEPASISCKSSQSLLYSRNQKNYLAWYQQKPGQSPKLLIYWASTRESGVPDRFSGSGSGTDFTLKISRVEAEDVGVYYCQQYFSYPLTFGGGTKVEIK

SEQ ID NO: 1859 - DNA, 756 bp, Artificial Sequence
  FA19D12-HL
caggtgcagctggtccagtctggagctgaggtgaagaagcctggggcttcagtaaaggtgtcctgcaaggcttctggatacacattcactgaatacaccatacactgggtgagacaggcccatggacagagccttgagtggatgggaggtattaatcctaacaatggtattcctaactacaatcagaagttcaagggcagggtcacaataactgtagacacgtccgccagcaccgcctacatggagctccgcagcctgagatctgaggatactgcggtctattactgtgcaagaagaagaatcgcctatggttacgacgagggccatgctatggactactggggtcaaggaaccctggtcaccgtctcctcaggtggtggtggttctggcggcggcggctccggtggtggtggttctgacatcgtgatgacacagactccattctccctacctgtgacacctggagagccggcttctatcagctgcaagtccagtcagagccttttatatagtcgtaatcaaaagaactacttggcctggtaccagcagaagccagggcagtctcctaaactgctgatttactgggcatccactagggaatctggggtccctgatcgcttctcaggcagtggatctgggacggatttcactctcaaaatctccagagtggaggctgaggacgtgggagtttattactgtcagcaatattttagctatccgctcacgttcggtggtgggaccaaggtggagatcaaa

SEQ ID NO: 1860 - protein, 507 aa, Artificial Sequence
  FA19D12HL x I2C HL
QVQLVQSGAEVKKPGASVKVSCKASGYTFTEYTIHWVRQAHGQSLEWMGGINPNNGIPNYNQKFKGRVTITVDTSASTAYMELRSLRSEDTAVYYCARRRIAYGYDEGHAMDYWGQGTLVTVSSGGGGSGGGGSGGGGSDIVMTQTPFSLPVTPGEPASISCKSSQSLLYSRNQKNYLAWYQQKPGQSPKLLIYWASTRESGVPDRFSGSGSGTDFTLKISRVEAEDVGVYYCQQYFSYPLTFGGGTKVEIKSGGGGSEVQLVESGGGLVQPGGSLKLSCAASGFTFNKYAMNWVRQAPGKGLEWVARIRSKYNNYATYYADSVKDRFTISRDDSKNTAYLQMNNLKTEDTAVYYCVRHGNFGNSYISYWAYWGQGTLVTVSSGGGGSGGGGSGGGGSQTVVTQEPSLTVSPGGTVTLTCGSSTGAVTSGNYPNWVQQKPGQAPRGLIGGTKFLAPGTPARFSGSLLGGKAALTLSGVQPEDEAEYYCVLWYSNRWVFGGGTKLTVL

SEQ ID NO: 1861 - DNA, 1521 bp, Artificial Sequence
  FA19D12HL x I2C HL
caggtgcagctggtccagtctggagctgaggtgaagaagcctggggcttcagtaaaggtgtcctgcaaggcttctggatacacattcactgaatacaccatacactgggtgagacaggcccatggacagagccttgagtggatgggaggtattaatcctaacaatggtattcctaactacaatcagaagttcaagggcagggtcacaataactgtagacacgtccgccagcaccgcctacatggagctccgcagcctgagatctgaggatactgcggtctattactgtgcaagaagaagaatcgcctatggttacgacgagggccatgctatggactactggggtcaaggaaccctggtcaccgtctcctcaggtggtggtggttctggcggcggcggctccggtggtggtggttctgacatcgtgatgacacagactccattctccctacctgtgacacctggagagccggcttctatcagctgcaagtccagtcagagccttttatatagtcgtaatcaaaagaactacttggcctggtaccagcagaagccagggcagtctcctaaactgctgatttactgggcatccactagggaatctggggtccctgatcgcttctcaggcagtggatctgggacggatttcactctcaaaatctccagagtggaggctgaggacgtgggagtttattactgtcagcaatattttagctatccgctcacgttcggtggtgggaccaaggtggagatcaaatccggaggtggtggatccgaggtgcagctggtcgagtctggaggaggattggtgcagcctggagggtcattgaaactctcatgtgcagcctctggattcaccttcaataagtacgccatgaactgggtccgccaggctccaggaaagggtttggaatgggttgctcgcataagaagtaaatataataattatgcaacatattatgccgattcagtgaaagacaggttcaccatctccagagatgattcaaaaaacactgcctatctacaaatgaacaacttgaaaactgaggacactgccgtgtactactgtgtgagacatgggaacttcggtaatagctacatatcctactgggcttactggggccaagggactctggtcaccgtctcctcaggtggtggtggttctggcggcggcggctccggtggtggtggttctcagactgttgtgactcaggaaccttcactcaccgtatcacctggtggaacagtcacactcacttgtggctcctcgactggggctgttacatctggcaactacccaaactgggtccaacaaaaaccaggtcaggcaccccgtggtctaataggtgggactaagttcctcgcccccggtactcctgccagattctcaggctccctgcttggaggcaaggctgccctcaccctctcaggggtacagccagaggatgaggcagaatattactgtgttctatggtacagcaaccgctgggtgttcggtggaggaaccaaactgactgtccta

SEQ ID NO: 1862 - protein, 124 aa, Artificial Sequence
  FA19D9-H
QVQLVQSGAEVKKPGASVKVSCKTSGYTFTEYTIHWVRQAPGQRLEWMGGINPNNGIPNYNQKFKGRATLTIDTSASTAYMELSSLTSEDTAVYYCARRRIAYGYDEGHAMDYWGQGTLVTVSS

SEQ ID NO: 1863 - protein, 5 aa, Artificial Sequence
  FA19D9-HCDR1
EYTIH

SEQ ID NO: 1864 - protein, 17 aa, Artificial Sequence
  FA19D9-HCDR2
GINPNNGIPNYNQKFKG

SEQ ID NO: 1865 - protein, 15 aa, Artificial Sequence
  FA19D9-HCDR3
RRIAYGYDEGHAMDY

SEQ ID NO: 1866 - DNA, 372 bp, Artificial Sequence
  FA19D9-H
caggtgcagctggtccagtctggagctgaggtgaagaagcctggggcttcagtaaaggtgtcctgcaagacttctggatacacattcactgaatacaccatacactgggtgagacaggcccctggacagagacttgagtggatgggaggtattaatcctaacaatggtattcctaactacaatcagaagttcaagggcagggccacattaactatagacacgtccgccagcaccgcctacatggagctcagcagcctgacatctgaggatactgcggtctattactgtgcaagaagaagaatcgcctatggttacgacgagggccatgctatggactactggggtcaaggaaccctggtcaccgtctcctca

SEQ ID NO: 1867 - protein, 113 aa, Artificial Sequence
  FA19D9-L
DIVMTQTPLSLPVTPGEPASMSCKSSQSLLYSRNQKNYLAWFLQKPGQSPKLLIYWASTRESGVPDRFSGSGSGTDFTLKISRVEAEDVGVYYCQQYFSYPLTFGGGTKVEIK

SEQ ID NO: 1868 - protein, 17 aa, Artificial Sequence
  FA19D9-LCDR1
KSSQSLLYSRNQKNYLA

SEQ ID NO: 1869 - protein, 7 aa, Artificial Sequence
  FA19D9-LCDR2
WASTRES

SEQ ID NO: 1870 - protein, 9 aa, Artificial Sequence
  FA19D9-LCDR3
QQYFSYPLT

SEQ ID NO: 1871 - DNA, 339 bp, Artificial Sequence
  FA19D9-L
gacatcgtgatgacacagactccactctccctacctgtgacacctggagagccggcttctatgagctgcaagtccagtcagagccttttatatagtcgtaatcaaaagaactacttggcctggttcctgcagaagccagggcagtctcctaaactgctgatttactgggcatccactagggaatctggggtccctgatcgcttctcaggcagtggatctgggacggatttcactctcaagatcagcagagtggaggctgaggacgtgggagtttattactgtcagcaatattttagctatccgctcacgttcggtggtgggaccaaggtggagatcaaa

SEQ ID NO: 1872 - protein, 252 aa, Artificial Sequence
  FA19D9-HL
QVQLVQSGAEVKKPGASVKVSCKTSGYTFTEYTIHWVRQAPGQRLEWMGGINPNNGIPNYNQKFKGRATLTIDTSASTAYMELSSLTSEDTAVYYCARRRIAYGYDEGHAMDYWGQGTLVTVSSGGGGSGGGGSGGGGSDIVMTQTPLSLPVTPGEPASMSCKSSQSLLYSRNQKNYLAWFLQKPGQSPKLLIYWASTRESGVPDRFSGSGSGTDFTLKISRVEAEDVGVYYCQQYFSYPLTFGGGTKVEIK

SEQ ID NO: 1873 - DNA, 756 bp, Artificial Sequence
  FA19D9-HL
caggtgcagctggtccagtctggagctgaggtgaagaagcctggggcttcagtaaaggtgtcctgcaagacttctggatacacattcactgaatacaccatacactgggtgagacaggcccctggacagagacttgagtggatgggaggtattaatcctaacaatggtattcctaactacaatcagaagttcaagggcagggccacattaactatagacacgtccgccagcaccgcctacatggagctcagcagcctgacatctgaggatactgcggtctattactgtgcaagaagaagaatcgcctatggttacgacgagggccatgctatggactactggggtcaaggaaccctggtcaccgtctcctcaggtggtggtggttctggcggcggcggctccggtggtggtggttctgacatcgtgatgacacagactccactctccctacctgtgacacctggagagccggcttctatgagctgcaagtccagtcagagccttttatatagtcgtaatcaaaagaactacttggcctggttcctgcagaagccagggcagtctcctaaactgctgatttactgggcatccactagggaatctggggtccctgatcgcttctcaggcagtggatctgggacggatttcactctcaagatcagcagagtggaggctgaggacgtgggagtttattactgtcagcaatattttagctatccgctcacgttcggtggtgggaccaaggtggagatcaaa

SEQ ID NO: 1874 - protein, 507 aa, Artificial Sequence
  FA19D9HL x I2C HL
QVQLVQSGAEVKKPGASVKVSCKTSGYTFTEYTIHWVRQAPGQRLEWMGGINPNNGIPNYNQKFKGRATLTIDTSASTAYMELSSLTSEDTAVYYCARRRIAYGYDEGHAMDYWGQGTLVTVSSGGGGSGGGGSGGGGSDIVMTQTPLSLPVTPGEPASMSCKSSQSLLYSRNQKNYLAWFLQKPGQSPKLLIYWASTRESGVPDRFSGSGSGTDFTLKISRVEAEDVGVYYCQQYFSYPLTFGGGTKVEIKSGGGGSEVQLVESGGGLVQPGGSLKLSCAASGFTFNKYAMNWVRQAPGKGLEWVARIRSKYNNYATYYADSVKDRFTISRDDSKNTAYLQMNNLKTEDTAVYYCVRHGNFGNSYISYWAYWGQGTLVTVSSGGGGSGGGGSGGGGSQTVVTQEPSLTVSPGGTVTLTCGSSTGAVTSGNYPNWVQQKPGQAPRGLIGGTKFLAPGTPARFSGSLLGGKAALTLSGVQPEDEAEYYCVLWYSNRWVFGGGTKLTVL

SEQ ID NO: 1875 - DNA, 1521 bp, Artificial Sequence
  FA19D9HL x I2C HL
caggtgcagctggtccagtctggagctgaggtgaagaagcctggggcttcagtaaaggtgtcctgcaagacttctggatacacattcactgaatacaccatacactgggtgagacaggcccctggacagagacttgagtggatgggaggtattaatcctaacaatggtattcctaactacaatcagaagttcaagggcagggccacattaactatagacacgtccgccagcaccgcctacatggagctcagcagcctgacatctgaggatactgcggtctattactgtgcaagaagaagaatcgcctatggttacgacgagggccatgctatggactactggggtcaaggaaccctggtcaccgtctcctcaggtggtggtggttctggcggcggcggctccggtggtggtggttctgacatcgtgatgacacagactccactctccctacctgtgacacctggagagccggcttctatgagctgcaagtccagtcagagccttttatatagtcgtaatcaaaagaactacttggcctggttcctgcagaagccagggcagtctcctaaactgctgatttactgggcatccactagggaatctggggtccctgatcgcttctcaggcagtggatctgggacggatttcactctcaagatcagcagagtggaggctgaggacgtgggagtttattactgtcagcaatattttagctatccgctcacgttcggtggtgggaccaaggtggagatcaaatccggaggtggtggatccgaggtgcagctggtcgagtctggaggaggattggtgcagcctggagggtcattgaaactctcatgtgcagcctctggattcaccttcaataagtacgccatgaactgggtccgccaggctccaggaaagggtttggaatgggttgctcgcataagaagtaaatataataattatgcaacatattatgccgattcagtgaaagacaggttcaccatctccagagatgattcaaaaaacactgcctatctacaaatgaacaacttgaaaactgaggacactgccgtgtactactgtgtgagacatgggaacttcggtaatagctacatatcctactgggcttactggggccaagggactctggtcaccgtctcctcaggtggtggtggttctggcggcggcggctccggtggtggtggttctcagactgttgtgactcaggaaccttcactcaccgtatcacctggtggaacagtcacactcacttgtggctcctcgactggggctgttacatctggcaactacccaaactgggtccaacaaaaaccaggtcaggcaccccgtggtctaataggtgggactaagttcctcgcccccggtactcctgccagattctcaggctccctgcttggaggcaaggctgccctcaccctctcaggggtacagccagaggatgaggcagaatattactgtgttctatggtacagcaaccgctgggtgttcggtggaggaaccaaactgactgtccta

SEQ ID NO: 1876 - protein, 122 aa, Mus sp.
EVQLLESGGGLVQPGGSLKLSCAASGFDFSRYWMSWVRQAPGKGLEWIGEINPDSSTINYTPSLKDKFIISRDNAKNTLYLQMSKVRSEDTALYYCAGGYYRYPYYYTMDYWGQGTTVTVSS

SEQ ID NO: 1877 - protein, 5 aa, Mus sp.
RYWMS

SEQ ID NO: 1878 - protein, 17 aa, Mus sp.
EINPDSSTINYTPSLKD

SEQ ID NO: 1879 - protein, 13 aa, Mus sp.
GYYRYPYYYTMDY

SEQ ID NO: 1880 - DNA, 366 bp, Mus sp.
gaggtgcagctgctcgagtctggaggtggcctggtgcagcctggaggatccctgaaactctcctgtgcagcctcaggattcgattttagtagatactggatgagttgggtccggcaggctccagggaaagggctagaatggattggagaaattaatccagatagcagtacgataaactatacgccatctctaaaggataaattcatcatctccagagacaacgccaaaaatacgctgtacctgcaaatgagcaaagtgagatctgaggacacagccctttattactgtgcaggaggatactataggtacccatattactatactatggactactggggccaagggaccacggtcaccgtctcctca

SEQ ID NO: 1881 - protein, 107 aa, Mus sp.
ELVMTQSPASLSASVGETVTITCRASGNIHNYLAWYQQKQGKSPQLLVYNAKTLADGVPSRFSGSGSGTQYSLKINSLQPEDFGSYYCQHFWSTPYTFGGGTKLEIK

SEQ ID NO: 1882 - protein, 11 aa, Mus sp.
RASGNIHNYLA

SEQ ID NO: 1883 - protein, 7 aa, Mus sp.
NAKTLAD

SEQ ID NO: 1884 - protein, 9 aa, Mus sp.
QHFWSTPYT

SEQ ID NO: 1885 - DNA, 321 bp, Mus sp.
gagctcgtgatgacacagtctccagcctccctatctgcatctgtgggagaaactgtcaccatcacatgtcgagcaagtgggaatattcacaattatttagcatggtatcagcagaaacagggaaaatctcctcagctcctggtctataatgcaaaaaccttagcagatggtgtgccatcaaggttcagtggcagtggatcaggaacacaatattctctcaagatcaacagcctgcagcctgaagattttgggagttattactgtcaacatttttggagtactccgtacacgttcggaggggggaccaagcttgagatcaaa

SEQ ID NO: 1886 - protein, 244 aa, Mus sp.
EVQLLESGGGLVQPGGSLKLSCAASGFDFSRYWMSWVRQAPGKGLEWIGEINPDSSTINYTPSLKDKFIISRDNAKNTLYLQMSKVRSEDTALYYCAGGYYRYPYYYTMDYWGQGTTVTVSSGGGGSGGGGSGGGGSELVMTQSPASLSASVGETVTITCRASGNIHNYLAWYQQKQGKSPQLLVYNAKTLADGVPSRFSGSGSGTQYSLKINSLQPEDFGSYYCQHFWSTPYTFGGGTKLEIK

SEQ ID NO: 1887 - DNA, 732 bp, Mus sp.
gaggtgcagctgctcgagtctggaggtggcctggtgcagcctggaggatccctgaaactctcctgtgcagcctcaggattcgattttagtagatactggatgagttgggtccggcaggctccagggaaagggctagaatggattggagaaattaatccagatagcagtacgataaactatacgccatctctaaaggataaattcatcatctccagagacaacgccaaaaatacgctgtacctgcaaatgagcaaagtgagatctgaggacacagccctttattactgtgcaggaggatactataggtacccatattactatactatggactactggggccaagggaccacggtcaccgtctcctcaggtggtggtggttctggcggcggcggctccggtggtggtggttctgagctcgtgatgacacagtctccagcctccctatctgcatctgtgggagaaactgtcaccatcacatgtcgagcaagtgggaatattcacaattatttagcatggtatcagcagaaacagggaaaatctcctcagctcctggtctataatgcaaaaaccttagcagatggtgtgccatcaaggttcagtggcagtggatcaggaacacaatattctctcaagatcaacagcctgcagcctgaagattttgggagttattactgtcaacatttttggagtactccgtacacgttcggaggggggaccaagcttgagatcaaa

SEQ ID NO: 1888 - protein, 499 aa, Mus sp.
EVQLLESGGGLVQPGGSLKLSCAASGFDFSRYWMSWVRQAPGKGLEWIGEINPDSSTINYTPSLKDKFIISRDNAKNTLYLQMSKVRSEDTALYYCAGGYYRYPYYYTMDYWGQGTTVTVSSGGGGSGGGGSGGGGSELVMTQSPASLSASVGETVTITCRASGNIHNYLAWYQQKQGKSPQLLVYNAKTLADGVPSRFSGSGSGTQYSLKINSLQPEDFGSYYCQHFWSTPYTFGGGTKLEIKSGGGGSEVQLVESGGGLVQPGGSLKLSCAASGFTFNKYAMNWVRQAPGKGLEWVARIRSKYNNYATYYADSVKDRFTISRDDSKNTAYLQMNNLKTEDTAVYYCVRHGNFGNSYISYWAYWGQGTLVTVSSGGGGSGGGGSGGGGSQTVVTQEPSLTVSPGGTVTLTCGSSTGAVTSGNYPNWVQQKPGQAPRGLIGGTKFLAPGTPARFSGSLLGGKAALTLSGVQPEDEAEYYCVLWYSNRWVFGGGTKLTVL

SEQ ID NO: 1889 - DNA, 1497 bp, Mus sp.
gaggtgcagctgctcgagtctggaggtggcctggtgcagcctggaggatccctgaaactctcctgtgcagcctcaggattcgattttagtagatactggatgagttgggtccggcaggctccagggaaagggctagaatggattggagaaattaatccagatagcagtacgataaactatacgccatctctaaaggataaattcatcatctccagagacaacgccaaaaatacgctgtacctgcaaatgagcaaagtgagatctgaggacacagccctttattactgtgcaggaggatactataggtacccatattactatactatggactactggggccaagggaccacggtcaccgtctcctcaggtggtggtggttctggcggcggcggctccggtggtggtggttctgagctcgtgatgacacagtctccagcctccctatctgcatctgtgggagaaactgtcaccatcacatgtcgagcaagtgggaatattcacaattatttagcatggtatcagcagaaacagggaaaatctcctcagctcctggtctataatgcaaaaaccttagcagatggtgtgccatcaaggttcagtggcagtggatcaggaacacaatattctctcaagatcaacagcctgcagcctgaagattttgggagttattactgtcaacatttttggagtactccgtacacgttcggaggggggaccaagcttgagatcaaatccggaggtggtggatccgaggtgcagctggtcgagtctggaggaggattggtgcagcctggagggtcattgaaactctcatgtgcagcctctggattcaccttcaataagtacgccatgaactgggtccgccaggctccaggaaagggtttggaatgggttgctcgcataagaagtaaatataataattatgcaacatattatgccgattcagtgaaagacaggttcaccatctccagagatgattcaaaaaacactgcctatctacaaatgaacaacttgaaaactgaggacactgccgtgtactactgtgtgagacatgggaacttcggtaatagctacatatcctactgggcttactggggccaagggactctggtcaccgtctcctcaggtggtggtggttctggcggcggcggctccggtggtggtggttctcagactgttgtgactcaggaaccttcactcaccgtatcacctggtggaacagtcacactcacttgtggctcctcgactggggctgttacatctggcaactacccaaactgggtccaacaaaaaccaggtcaggcaccccgtggtctaataggtgggactaagttcctcgcccccggtactcctgccagattctcaggctccctgcttggaggcaaggctgccctcaccctctcaggggtacagccagaggatgaggcagaatattactgtgttctatggtacagcaaccgctgggtgttcggtggaggaaccaaactgactgtccta

SEQ ID NO: 1890 - protein, 122 aa, Mus sp.
EVQLLESGGGLVQPGGSLKLSCAASGFDFSRSWMSWVRQAPGKGLEWIGEINPDSSTINYTPSLKDKFIISRDNAKNTLYLQMSKVRSEDTALYYCAGGYYRYPYYYTMDYWGQGTTVTVSS

SEQ ID NO: 1891 - protein, 5 aa, Mus sp.
RSWMS

SEQ ID NO: 1892 - protein, 17 aa, Mus sp.
EINPDSSTINYTPSLKD

SEQ ID NO: 1893 - protein, 13 aa, Mus sp.
GYYRYPYYYTMDY

SEQ ID NO: 1894 - DNA, 366 bp, Mus sp.
gaggtgcagctgctcgagtctggaggtggcctggtgcagcctggaggatccctgaaactctcctgtgcagcctcaggattcgattttagtagatcctggatgagttgggtccggcaggctccagggaaagggcttgaatggattggagaaattaatccagatagcagtacgataaactatacgccatctctaaaggataaattcatcatctccagagacaacgccaaaaatacgctgtacctgcaaatgagcaaagtgagatctgaggacacagccctttattactgtgcaggaggatactataggtacccatattactatactatggactactggggccaagggaccacggtcaccgtctcctca

SEQ ID NO: 1895 - protein, 107 aa, Mus sp.
ELQMTQSPASLSASVGETVTITCRASGNIHNYLAWYQQKQGKSPQLLVYNAKTLADGVPSRFSGSGSGTQYSLKINSLQPEDFGSYYCQHFWSTPYTFGGGTKLEIK

SEQ ID NO: 1896 - protein, 11 aa, Mus sp.
RASGNIHNYLA

SEQ ID NO: 1897 - protein, 7 aa, Mus sp.
NAKTLAD

SEQ ID NO: 1898 - protein, 9 aa, Mus sp.
QHFWSTPYT

SEQ ID NO: 1899 - DNA, 321 bp, Mus sp.
gagctccagatgacccagtctccagcctccctatctgcatctgtgggagaaactgtcaccatcacatgtcgagcaagtgggaatattcacaattatttggcatggtatcagcagaaacagggaaaatctcctcagctcctagtctataatgcaaaaaccttagcggatggtgtgccatcaaggttcagtggcagtggatcaggaacacaatattctctcaagatcaacagcctgcagcctgaagattttgggagttattactgtcaacatttttggagtactccgtacacgttcggaggggggaccaagcttgagatcaaa

SEQ ID NO: 1900 - protein, 244 aa, Mus sp.
EVQLLESGGGLVQPGGSLKLSCAASGFDFSRSWMSWVRQAPGKGLEWIGEINPDSSTINYTPSLKDKFIISRDNAKNTLYLQMSKVRSEDTALYYCAGGYYRYPYYYTMDYWGQGTTVTVSSGGGGSGGGGSGGGGSELQMTQSPASLSASVGETVTITCRASGNIHNYLAWYQQKQGKSPQLLVYNAKTLADGVPSRFSGSGSGTQYSLKINSLQPEDFGSYYCQHFWSTPYTFGGGTKLEIK

SEQ ID NO: 1901 - DNA, 732 bp, Mus sp.
gaggtgcagctgctcgagtctggaggtggcctggtgcagcctggaggatccctgaaactctcctgtgcagcctcaggattcgattttagtagatcctggatgagttgggtccggcaggctccagggaaagggcttgaatggattggagaaattaatccagatagcagtacgataaactatacgccatctctaaaggataaattcatcatctccagagacaacgccaaaaatacgctgtacctgcaaatgagcaaagtgagatctgaggacacagccctttattactgtgcaggaggatactataggtacccatattactatactatggactactggggccaagggaccacggtcaccgtctcctcaggtggtggtggttctggcggcggcggctccggtggtggtggttctgagctccagatgacccagtctccagcctccctatctgcatctgtgggagaaactgtcaccatcacatgtcgagcaagtgggaatattcacaattatttggcatggtatcagcagaaacagggaaaatctcctcagctcctagtctataatgcaaaaaccttagcggatggtgtgccatcaaggttcagtggcagtggatcaggaacacaatattctctcaagatcaacagcctgcagcctgaagattttgggagttattactgtcaacatttttggagtactccgtacacgttcggaggggggaccaagcttgagatcaaa

SEQ ID NO: 1902 - protein, 499 aa, Mus sp.
EVQLLESGGGLVQPGGSLKLSCAASGFDFSRSWMSWVRQAPGKGLEWIGEINPDSSTINYTPSLKDKFIISRDNAKNTLYLQMSKVRSEDTALYYCAGGYYRYPYYYTMDYWGQGTTVTVSSGGGGSGGGGSGGGGSELQMTQSPASLSASVGETVTITCRASGNIHNYLAWYQQKQGKSPQLLVYNAKTLADGVPSRFSGSGSGTQYSLKINSLQPEDFGSYYCQHFWSTPYTFGGGTKLEIKSGGGGSEVQLVESGGGLVQPGGSLKLSCAASGFTFNKYAMNWVRQAPGKGLEWVARIRSKYNNYATYYADSVKDRFTISRDDSKNTAYLQMNNLKTEDTAVYYCVRHGNFGNSYISYWAYWGQGTLVTVSSGGGGSGGGGSGGGGSQTVVTQEPSLTVSPGGTVTLTCGSSTGAVTSGNYPNWVQQKPGQAPRGLIGGTKFLAPGTPARFSGSLLGGKAALTLSGVQPEDEAEYYCVLWYSNRWVFGGGTKLTVL

SEQ ID NO: 1903 - DNA, 1497 bp, Mus sp.
gaggtgcagctgctcgagtctggaggtggcctggtgcagcctggaggatccctgaaactctcctgtgcagcctcaggattcgattttagtagatcctggatgagttgggtccggcaggctccagggaaagggcttgaatggattggagaaattaatccagatagcagtacgataaactatacgccatctctaaaggataaattcatcatctccagagacaacgccaaaaatacgctgtacctgcaaatgagcaaagtgagatctgaggacacagccctttattactgtgcaggaggatactataggtacccatattactatactatggactactggggccaagggaccacggtcaccgtctcctcaggtggtggtggttctggcggcggcggctccggtggtggtggttctgagctccagatgacccagtctccagcctccctatctgcatctgtgggagaaactgtcaccatcacatgtcgagcaagtgggaatattcacaattatttggcatggtatcagcagaaacagggaaaatctcctcagctcctagtctataatgcaaaaaccttagcggatggtgtgccatcaaggttcagtggcagtggatcaggaacacaatattctctcaagatcaacagcctgcagcctgaagattttgggagttattactgtcaacatttttggagtactccgtacacgttcggaggggggaccaagcttgagatcaaatccggaggtggtggatccgaggtgcagctggtcgagtctggaggaggattggtgcagcctggagggtcattgaaactctcatgtgcagcctctggattcaccttcaataagtacgccatgaactgggtccgccaggctccaggaaagggtttggaatgggttgctcgcataagaagtaaatataataattatgcaacatattatgccgattcagtgaaagacaggttcaccatctccagagatgattcaaaaaacactgcctatctacaaatgaacaacttgaaaactgaggacactgccgtgtactactgtgtgagacatgggaacttcggtaatagctacatatcctactgggcttactggggccaagggactctggtcaccgtctcctcaggtggtggtggttctggcggcggcggctccggtggtggtggttctcagactgttgtgactcaggaaccttcactcaccgtatcacctggtggaacagtcacactcacttgtggctcctcgactggggctgttacatctggcaactacccaaactgggtccaacaaaaaccaggtcaggcaccccgtggtctaataggtgggactaagttcctcgcccccggtactcctgccagattctcaggctccctgcttggaggcaaggctgccctcaccctctcaggggtacagccagaggatgaggcagaatattactgtgttctatggtacagcaaccgctgggtgttcggtggaggaaccaaactgactgtccta

SEQ ID NO: 1904 - protein, 122 aa, Mus sp.
EVQLLESGGGLVQPGGSLKLSCAASGFDFSTYWMSWVRQAPGKGLEWIGEINPDSSTINYTPSLKDKFIISRDNAKNTLYLQMNKVRSEDTALYYCAGGYYRYPYYYTMDYWGQGTTVTVSS

SEQ ID NO: 1905 - protein, 5 aa, Mus sp.
TYWMS

SEQ ID NO: 1906 - protein, 17 aa, Mus sp.
EINPDSSTINYTPSLKD

SEQ ID NO: 1907 - protein, 13 aa, Mus sp.
GYYRYPYYYTMDY

SEQ ID NO: 1908 - DNA, 366 bp, Mus sp.
gaggtgcagctgctcgagtctggaggtggcctggtgcagcctggaggatccctgaaactctcctgtgcagcctcaggattcgattttagtacatactggatgagttgggtccggcaggctccagggaaagggctagaatggattggagaaattaatccagatagcagtacgataaactatacgccatctctaaaggataaattcatcatctccagagacaacgccaaaaatacgctgtacctgcaaatgaacaaagtgagatctgaggacacagccctttattactgtgcaggaggatactataggtacccatattactatactatggactactggggccaagggaccacggtcaccgtctcctca

SEQ ID NO: 1909 - protein, 107 aa, Mus sp.; identical to SEQ ID NO: 1881

SEQ ID NO: 1910 - protein, 11 aa, Mus sp.
RASGNIHNYLA

SEQ ID NO: 1911 - protein, 7 aa, Mus sp.
NAKTLAD

SEQ ID NO: 1912 - protein, 9 aa, Mus sp.
QHFWSTPYT

SEQ ID NO: 1913 - DNA, 321 bp, Mus sp.
gagctcgtcatgacccagtctccagcctccctatctgcatctgtgggagaaactgtcaccatcacatgtcgagcaagtgggaatattcacaattatttagcatggtatcagcagaaacagggaaaatctcctcagctcctggtctataatgcaaaaaccttagcagatggtgtgccatcaaggttcagtggcagtggatcaggaacacaatattctctcaagatcaacagcctgcagcctgaagattttgggagttattactgtcaacatttttggagtactccgtacacgttcggaggggggaccaagcttgagatcaaa

SEQ ID NO: 1914 - protein, 244 aa, Mus sp.
EVQLLESGGGLVQPGGSLKLSCAASGFDFSTYWMSWVRQAPGKGLEWIGEINPDSSTINYTPSLKDKFIISRDNAKNTLYLQMNKVRSEDTALYYCAGGYYRYPYYYTMDYWGQGTTVTVSSGGGGSGGGGSGGGGSELVMTQSPASLSASVGETVTITCRASGNIHNYLAWYQQKQGKSPQLLVYNAKTLADGVPSRFSGSGSGTQYSLKINSLQPEDFGSYYCQHFWSTPYTFGGGTKLEIK

SEQ ID NO: 1915 - DNA, 732 bp, Mus sp.
gaggtgcagctgctcgagtctggaggtggcctggtgcagcctggaggatccctgaaactctcctgtgcagcctcaggattcgattttagtacatactggatgagttgggtccggcaggctccagggaaagggctagaatggattggagaaattaatccagatagcagtacgataaactatacgccatctctaaaggataaattcatcatctccagagacaacgccaaaaatacgctgtacctgcaaatgaacaaagtgagatctgaggacacagccctttattactgtgcaggaggatactataggtacccatattactatactatggactactggggccaagggaccacggtcaccgtctcctcaggtggtggtggttctggcggcggcggctccggtggtggtggttctgagctcgtcatgacccagtctccagcctccctatctgcatctgtgggagaaactgtcaccatcacatgtcgagcaagtgggaatattcacaattatttagcatggtatcagcagaaacagggaaaatctcctcagctcctggtctataatgcaaaaaccttagcagatggtgtgccatcaaggttcagtggcagtggatcaggaacacaatattctctcaagatcaacagcctgcagcctgaagattttgggagttattactgtcaacatttttggagtactccgtacacgttcggaggggggaccaagcttgagatcaaa

SEQ ID NO: 1916 - protein, 499 aa, Mus sp.
EVQLLESGGGLVQPGGSLKLSCAASGFDFSTYWMSWVRQAPGKGLEWIGEINPDSSTINYTPSLKDKFIISRDNAKNTLYLQMNKVRSEDTALYYCAGGYYRYPYYYTMDYWGQGTTVTVSSGGGGSGGGGSGGGGSELVMTQSPASLSASVGETVTITCRASGNIHNYLAWYQQKQGKSPQLLVYNAKTLADGVPSRFSGSGSGTQYSLKINSLQPEDFGSYYCQHFWSTPYTFGGGTKLEIKSGGGGSEVQLVESGGGLVQPGGSLKLSCAASGFTFNKYAMNWVRQAPGKGLEWVARIRSKYNNYATYYADSVKDRFTISRDDSKNTAYLQMNNLKTEDTAVYYCVRHGNFGNSYISYWAYWGQGTLVTVSSGGGGSGGGGSGGGGSQTVVTQEPSLTVSPGGTVTLTCGSSTGAVTSGNYPNWVQQKPGQAPRGLIGGTKFLAPGTPARFSGSLLGGKAALTLSGVQPEDEAEYYCVLWYSNRWVFGGGTKLTVL

SEQ ID NO: 1917 - DNA, 1497 bp, Mus sp.
gaggtgcagctgctcgagtctggaggtggcctggtgcagcctggaggatccctgaaactctcctgtgcagcctcaggattcgattttagtacatactggatgagttgggtccggcaggctccagggaaagggctagaatggattggagaaattaatccagatagcagtacgataaactatacgccatctctaaaggataaattcatcatctccagagacaacgccaaaaatacgctgtacctgcaaatgaacaaagtgagatctgaggacacagccctttattactgtgcaggaggatactataggtacccatattactatactatggactactggggccaagggaccacggtcaccgtctcctcaggtggtggtggttctggcggcggcggctccggtggtggtggttctgagctcgtcatgacccagtctccagcctccctatctgcatctgtgggagaaactgtcaccatcacatgtcgagcaagtgggaatattcacaattatttagcatggtatcagcagaaacagggaaaatctcctcagctcctggtctataatgcaaaaaccttagcagatggtgtgccatcaaggttcagtggcagtggatcaggaacacaatattctctcaagatcaacagcctgcagcctgaagattttgggagttattactgtcaacatttttggagtactccgtacacgttcggaggggggaccaagcttgagatcaaatccggaggtggtggatccgaggtgcagctggtcgagtctggaggaggattggtgcagcctggagggtcattgaaactctcatgtgcagcctctggattcaccttcaataagtacgccatgaactgggtccgccaggctccaggaaagggtttggaatgggttgctcgcataagaagtaaatataataattatgcaacatattatgccgattcagtgaaagacaggttcaccatctccagagatgattcaaaaaacactgcctatctacaaatgaacaacttgaaaactgaggacactgccgtgtactactgtgtgagacatgggaacttcggtaatagctacatatcctactgggcttactggggccaagggactctggtcaccgtctcctcaggtggtggtggttctggcggcggcggctccggtggtggtggttctcagactgttgtgactcaggaaccttcactcaccgtatcacctggtggaacagtcacactcacttgtggctcctcgactggggctgttacatctggcaactacccaaactgggtccaacaaaaaccaggtcaggcaccccgtggtctaataggtgggactaagttcctcgcccccggtactcctgccagattctcaggctccctgcttggaggcaaggctgccctcaccctctcaggggtacagccagaggatgaggcagaatattactgtgttctatggtacagcaaccgctgggtgttcggtggaggaaccaaactgactgtccta

SEQ ID NO: 1918 - protein, 122 aa, Mus sp.
EVQLLESGGGLVQPGGSLKLSCAASGFDFSTYWMSWVRQAPGKGLEWIGEINPDSSTINYTPSLKDKFIISRDNAKNTLYLQMTKVRPEDTALYYCAGGYYRYPYYYTMDYWGQGTTVTVSS

SEQ ID NO: 1919 - protein, 5 aa, Mus sp.
TYWMS

SEQ ID NO: 1920 - protein, 17 aa, Mus sp.
EINPDSSTINYTPSLKD

SEQ ID NO: 1921 - protein, 13 aa, Mus sp.
GYYRYPYYYTMDY

SEQ ID NO: 1922 - DNA, 366 bp, Mus sp.
gaggtgcagctgctcgagtctggaggtggcctggtgcagcctggaggatccctgaaactctcctgtgcagcctcaggattcgattttagtacatactggatgagttgggtccggcaggctccagggaaagggctagaatggattggagaaattaatccagatagcagtacgataaactatacgccatctctaaaggataaattcatcatctccagagacaacgccaaaaatacgctgtacctgcaaatgaccaaagtgagacctgaggacacagccctttattactgtgcaggaggatactataggtacccatattactatactatggactactggggccaagggaccacggtcaccgtctcctca

SEQ ID NO: 1923 - protein, 107 aa, Mus sp.
ELVMTQSPASLSASVGETVTITCRASGSIHNYLAWYQQKQGKSPQLLVYNAKTLADGVPSRFSGSGSGTQYSLKINSLQPEDFGSYYCQHFWSTPYTFGGGTKLEIK

SEQ ID NO: 1924 - protein, 11 aa, Mus sp.
RASGSIHNYLA

SEQ ID NO: 1925 - protein, 7 aa, Mus sp.
NAKTLAD

SEQ ID NO: 1926 - protein, 9 aa, Mus sp.
QHFWSTPYT

SEQ ID NO: 1927 - DNA, 321 bp, Mus sp.
gagctcgtcatgacccagtctccagcctccctatctgcatctgtgggagaaactgtcaccatcacatgtcgagcaagtgggagtattcacaattatttagcatggtatcagcagaaacagggaaaatctcctcagctcctggtctataatgcaaaaaccttagcagatggtgtgccatcaaggttcagtggcagtggatcaggaacacaatattctctcaagatcaacagcctgcagcctgaagattttgggagttattactgtcaacatttttggagtactccgtacacgttcggaggggggaccaagcttgagatcaaa

SEQ ID NO: 1928 - protein, 244 aa, Mus sp.
EVQLLESGGGLVQPGGSLKLSCAASGFDFSTYWMSWVRQAPGKGLEWIGEINPDSSTINYTPSLKDKFIISRDNAKNTLYLQMTKVRPEDTALYYCAGGYYRYPYYYTMDYWGQGTTVTVSSGGGGSGGGGSGGGGSELVMTQSPASLSASVGETVTITCRASGSIHNYLAWYQQKQGKSPQLLVYNAKTLADGVPSRFSGSGSGTQYSLKINSLQPEDFGSYYCQHFWSTPYTFGGGTKLEIK

SEQ ID NO: 1929 - DNA, 732 bp, Mus sp.
gaggtgcagctgctcgagtctggaggtggcctggtgcagcctggaggatccctgaaactctcctgtgcagcctcaggattcgattttagtacatactggatgagttgggtccggcaggctccagggaaagggctagaatggattggagaaattaatccagatagcagtacgataaactatacgccatctctaaaggataaattcatcatctccagagacaacgccaaaaatacgctgtacctgcaaatgaccaaagtgagacctgaggacacagccctttattactgtgcaggaggatactataggtacccatattactatactatggactactggggccaagggaccacggtcaccgtctcctcaggtggtggtggttctggcggcggcggctccggtggtggtggttctgagctcgtcatgacccagtctccagcctccctatctgcatctgtgggagaaactgtcaccatcacatgtcgagcaagtgggagtattcacaattatttagcatggtatcagcagaaacagggaaaatctcctcagctcctggtctataatgcaaaaaccttagcagatggtgtgccatcaaggttcagtggcagtggatcaggaacacaatattctctcaagatcaacagcctgcagcctgaagattttgggagttattactgtcaacatttttggagtactccgtacacgttcggaggggggaccaagcttgagatcaaa

SEQ ID NO: 1930 - protein, 499 aa, Mus sp.
EVQLLESGGGLVQPGGSLKLSCAASGFDFSTYWMSWVRQAPGKGLEWIGEINPDSSTINYTPSLKDKFIISRDNAKNTLYLQMTKVRPEDTALYYCAGGYYRYPYYYTMDYWGQGTTVTVSSGGGGSGGGGSGGGGSELVMTQSPASLSASVGETVTITCRASGSIHNYLAWYQQKQGKSPQLLVYNAKTLADGVPSRFSGSGSGTQYSLKINSLQPEDFGSYYCQHFWSTPYTFGGGTKLEIKSGGGGSEVQLVESGGGLVQPGGSLKLSCAASGFTFNKYAMNWVRQAPGKGLEWVARIRSKYNNYATYYADSVKDRFTISRDDSKNTAYLQMNNLKTEDTAVYYCVRHGNFGNSYISYWAYWGQGTLVTVSSGGGGSGGGGSGGGGSQTVVTQEPSLTVSPGGTVTLTCGSSTGAVTSGNYPNWVQQKPGQAPRGLIGGTKFLAPGTPARFSGSLLGGKAALTLSGVQPEDEAEYYCVLWYSNRWVFGGGTKLTVL

SEQ ID NO: 1931 - DNA, 1497 bp, Mus sp.
gaggtgcagctgctcgagtctggaggtggcctggtgcagcctggaggatccctgaaactctcctgtgcagcctcaggattcgattttagtacatactggatgagttgggtccggcaggctccagggaaagggctagaatggattggagaaattaatccagatagcagtacgataaactatacgccatctctaaaggataaattcatcatctccagagacaacgccaaaaatacgctgtacctgcaaatgaccaaagtgagacctgaggacacagccctttattactgtgcaggaggatactataggtacccatattactatactatggactactggggccaagggaccacggtcaccgtctcctcaggtggtggtggttctggcggcggcggctccggtggtggtggttctgagctcgtcatgacccagtctccagcctccctatctgcatctgtgggagaaactgtcaccatcacatgtcgagcaagtgggagtattcacaattatttagcatggtatcagcagaaacagggaaaatctcctcagctcctggtctataatgcaaaaaccttagcagatggtgtgccatcaaggttcagtggcagtggatcaggaacacaatattctctcaagatcaacagcctgcagcctgaagattttgggagttattactgtcaacatttttggagtactccgtacacgttcggaggggggaccaagcttgagatcaaatccggaggtggtggatccgaggtgcagctggtcgagtctggaggaggattggtgcagcctggagggtcattgaaactctcatgtgcagcctctggattcaccttcaataagtacgccatgaactgggtccgccaggctccaggaaagggtttggaatgggttgctcgcataagaagtaaatataataattatgcaacatattatgccgattcagtgaaagacaggttcaccatctccagagatgattcaaaaaacactgcctatctacaaatgaacaacttgaaaactgaggacactgccgtgtactactgtgtgagacatgggaacttcggtaatagctacatatcctactgggcttactggggccaagggactctggtcaccgtctcctcaggtggtggtggttctggcggcggcggctccggtggtggtggttctcagactgttgtgactcaggaaccttcactcaccgtatcacctggtggaacagtcacactcacttgtggctcctcgactggggctgttacatctggcaactacccaaactgggtccaacaaaaaccaggtcaggcaccccgtggtctaataggtgggactaagttcctcgcccccggtactcctgccagattctcaggctccctgcttggaggcaaggctgccctcaccctctcaggggtacagccagaggatgaggcagaatattactgtgttctatggtacagcaaccgctgggtgttcggtggaggaaccaaactgactgtccta

SEQ ID NO: 1932 - protein, 122 aa, Mus sp.; identical to SEQ ID NO: 1890

SEQ ID NO: 1933 - protein, 5 aa, Mus sp.
RSWMS

SEQ ID NO: 1934 - protein, 17 aa, Mus sp.
EINPDSSTINYTPSLKD

SEQ ID NO: 1935 - protein, 13 aa, Mus sp.
GYYRYPYYYTMDY

SEQ ID NO: 1936 - DNA, 366 bp, Mus sp.; identical to SEQ ID NO: 1894

SEQ ID NO: 1937 - protein, 107 aa, Mus sp.
ELQMTQSPASLSASVGETVTITCRASENIYSYLAWYQQKQGKSPQLLVYNAKTLAEGVPSRFSGSGSRTQYSLKINSLQPEDFGSYYCQHFWSTPYTFGGGTKLEIK

SEQ ID NO: 1938 - protein, 11 aa, Mus sp.
RASENIYSYLA

SEQ ID NO: 1939 - protein, 7 aa, Mus sp.
NAKTLAE

SEQ ID NO: 1940 - protein, 9 aa, Mus sp.
QHFWSTPYT

SEQ ID NO: 1941 - DNA, 321 bp, Mus sp.
gagctccagatgacccagtctccagcctccctatctgcatctgtgggagaaactgtcaccatcacatgtcgagcaagtgagaatatttacagttatttagcatggtatcagcagaaacagggaaaatctcctcagctcctggtctataatgcaaaaaccttagcagaaggtgtgccatcaaggttcagtggcagtggatcaagaacacaatattctctcaagatcaacagcctgcagcctgaagattttgggagttattactgtcaacatttttggagtactccgtacacgttcggaggggggaccaagcttgagatcaaa

SEQ ID NO: 1942 - protein, 244 aa, Mus sp.
EVQLLESGGGLVQPGGSLKLSCAASGFDFSRSWMSWVRQAPGKGLEWIGEINPDSSTINYTPSLKDKFIISRDNAKNTLYLQMSKVRSEDTALYYCAGGYYRYPYYYTMDYWGQGTTVTVSSGGGGSGGGGSGGGGSELQMTQSPASLSASVGETVTITCRASENIYSYLAWYQQKQGKSPQLLVYNAKTLAEGVPSRFSGSGSRTQYSLKINSLQPEDFGSYYCQHFWSTPYTFGGGTKLEIK

SEQ ID NO: 1943 - DNA, 732 bp, Mus sp.
gaggtgcagctgctcgagtctggaggtggcctggtgcagcctggaggatccctgaaactctcctgtgcagcctcaggattcgattttagtagatcctggatgagttgggtccggcaggctccagggaaagggcttgaatggattggagaaattaatccagatagcagtacgataaactatacgccatctctaaaggataaattcatcatctccagagacaacgccaaaaatacgctgtacctgcaaatgagcaaagtgagatctgaggacacagccctttattactgtgcaggaggatactataggtacccatattactatactatggactactggggccaagggaccacggtcaccgtctcctcaggtggtggtggttctggcggcggcggctccggtggtggtggttctgagctccagatgacccagtctccagcctccctatctgcatctgtgggagaaactgtcaccatcacatgtcgagcaagtgagaatatttacagttatttagcatggtatcagcagaaacagggaaaatctcctcagctcctggtctataatgcaaaaaccttagcagaaggtgtgccatcaaggttcagtggcagtggatcaagaacacaatattctctcaagatcaacagcctgcagcctgaagattttgggagttattactgtcaacatttttggagtactccgtacacgttcggaggggggaccaagcttgagatcaaa

SEQ ID NO: 1944 - protein, 499 aa, Mus sp.
EVQLLESGGGLVQPGGSLKLSCAASGFDFSRSWMSWVRQAPGKGLEWIGEINPDSSTINYTPSLKDKFIISRDNAKNTLYLQMSKVRSEDTALYYCAGGYYRYPYYYTMDYWGQGTTVTVSSGGGGSGGGGSGGGGSELQMTQSPASLSASVGETVTITCRASENIYSYLAWYQQKQGKSPQLLVYNAKTLAEGVPSRFSGSGSRTQYSLKINSLQPEDFGSYYCQHFWSTPYTFGGGTKLEIKSGGGGSEVQLVESGGGLVQPGGSLKLSCAASGFTFNKYAMNWVRQAPGKGLEWVARIRSKYNNYATYYADSVKDRFTISRDDSKNTAYLQMNNLKTEDTAVYYCVRHGNFGNSYISYWAYWGQGTLVTVSSGGGGSGGGGSGGGGSQTVVTQEPSLTVSPGGTVTLTCGSSTGAVTSGNYPNWVQQKPGQAPRGLIGGTKFLAPGTPARFSGSLLGGKAALTLSGVQPEDEAEYYCVLWYSNRWVFGGGTKLTVL

SEQ ID NO: 1945 - DNA, 1497 bp, Mus sp.
gaggtgcagctgctcgagtctggaggtggcctggtgcagcctggaggatccctgaaactctcctgtgcagcctcaggattcgattttagtagatcctggatgagttgggtccggcaggctccagggaaagggcttgaatggattggagaaattaatccagatagcagtacgataaactatacgccatctctaaaggataaattcatcatctccagagacaacgccaaaaatacgctgtacctgcaaatgagcaaagtgagatctgaggacacagccctttattactgtgcaggaggatactataggtacccatattactatactatggactactggggccaagggaccacggtcaccgtctcctcaggtggtggtggttctggcggcggcggctccggtggtggtggttctgagctccagatgacccagtctccagcctccctatctgcatctgtgggagaaactgtcaccatcacatgtcgagcaagtgagaatatttacagttatttagcatggtatcagcagaaacagggaaaatctcctcagctcctggtctataatgcaaaaaccttagcagaaggtgtgccatcaaggttcagtggcagtggatcaagaacacaatattctctcaagatcaacagcctgcagcctgaagattttgggagttattactgtcaacatttttggagtactccgtacacgttcggaggggggaccaagcttgagatcaaatccggaggtggtggatccgaggtgcagctggtcgagtctggaggaggattggtgcagcctggagggtcattgaaactctcatgtgcagcctctggattcaccttcaataagtacgccatgaactgggtccgccaggctccaggaaagggtttggaatgggttgctcgcataagaagtaaatataataattatgcaacatattatgccgattcagtgaaagacaggttcaccatctccagagatgattcaaaaaacactgcctatctacaaatgaacaacttgaaaactgaggacactgccgtgtactactgtgtgagacatgggaacttcggtaatagctacatatcctactgggcttactggggccaagggactctggtcaccgtctcctcaggtggtggtggttctggcggcggcggctccggtggtggtggttctcagactgttgtgactcaggaaccttcactcaccgtatcacctggtggaacagtcacactcacttgtggctcctcgactggggctgttacatctggcaactacccaaactgggtccaacaaaaaccaggtcaggcaccccgtggtctaataggtgggactaagttcctcgcccccggtactcctgccagattctcaggctccctgcttggaggcaaggctgccctcaccctctcaggggtacagccagaggatgaggcagaatattactgtgttctatggtacagcaaccgctgggtgttcggtggaggaaccaaactgactgtccta

SEQ ID NO: 1946 - protein, 122 aa, Mus sp.
EVQLLESGGGLVQPGGSLKLSCAASGFDFSTYWMSWVRQAPGKGLEWIGEINPDSSTINYTPSLKDKFIISRDNAKNTLYLQMNKVRSDDTALYYCAGGYYRYPYYYTMDYWGQGTTVTVSS

SEQ ID NO: 1947 - protein, 5 aa, Mus sp.
TYWMS

SEQ ID NO: 1948 - protein, 17 aa, Mus sp.
EINPDSSTINYTPSLKD

SEQ ID NO: 1949 - protein, 13 aa, Mus sp.
GYYRYPYYYTMDY

SEQ ID NO: 1950 - DNA, 366 bp, Mus sp.
gaggtgcagctgctcgagtctggaggtggcctggtgcagcctggaggatccctgaaactctcctgtgcagcctcaggattcgattttagtacatactggatgagttgggtccggcaggctccagggaaagggctagaatggattggagaaattaatccagatagcagtacgataaactatacgccatctctaaaggataaattcatcatctccagagacaacgccaaaaatacgctgtacctgcaaatgaacaaagtgagatctgacgacacagccctttattactgtgcaggaggatactataggtacccatattactatactatggactactggggccaagggaccacggtcaccgtctcctca

SEQ ID NO: 1951 - protein, 107 aa, Mus sp.
ELVMTQSPSSLSASVGETVTITCRASGNIHNYLAWYQQKQGKSPQLLVYNAKTLADGVPSRFSGSGSGTQYSLKINSLQPEDFGSYYCQHFWSTPYTFGGGTKLEIK

SEQ ID NO: 1952 - protein, 11 aa, Mus sp.
RASGNIHNYLA

SEQ ID NO: 1953 - protein, 7 aa, Mus sp.
NAKTLAD

SEQ ID NO: 1954 - protein, 9 aa, Mus sp.
QHFWSTPYT

SEQ ID NO: 1955 - DNA, 321 bp, Mus sp.
gagctcgtgatgacacagtctccatcctccttatctgcatctgtgggagaaactgtcaccatcacatgtcgagcaagtgggaatattcacaattatttagcatggtatcagcagaaacagggaaaatctcctcagctcctggtctataatgcaaaaaccttagcagatggtgtgccatcaaggttcagtggcagtggatcaggaacacaatattctctcaagatcaacagcctgcagcctgaagattttgggagttattactgtcaacatttttggagtactccgtacacgttcggaggggggaccaagcttgagatcaaa

SEQ ID NO: 1956 - protein, 244 aa, Mus sp.
EVQLLESGGGLVQPGGSLKLSCAASGFDFSTYWMSWVRQAPGKGLEWIGEINPDSSTINYTPSLKDKFIISRDNAKNTLYLQMNKVRSDDTALYYCAGGYYRYPYYYTMDYWGQGTTVTVSSGGGGSGGGGSGGGGSELVMTQSPSSLSASVGETVTITCRASGNIHNYLAWYQQKQGKSPQLLVYNAKTLADGVPSRFSGSGSGTQYSLKINSLQPEDFGSYYCQHFWSTPYTFGGGTKLEIK

SEQ ID NO: 1957 - DNA, 732 bp, Mus sp.
gaggtgcagctgctcgagtctggaggtggcctggtgcagcctggaggatccctgaaactctcctgtgcagcctcaggattcgattttagtacatactggatgagttgggtccggcaggctccagggaaagggctagaatggattggagaaattaatccagatagcagtacgataaactatacgccatctctaaaggataaattcatcatctccagagacaacgccaaaaatacgctgtacctgcaaatgaacaaagtgagatctgacgacacagccctttattactgtgcaggaggatactataggtacccatattactatactatggactactggggccaagggaccacggtcaccgtctcctcaggtggtggtggttctggcggcggcggctccggtggtggtggttctgagctcgtgatgacacagtctccatcctccttatctgcatctgtgggagaaactgtcaccatcacatgtcgagcaagtgggaatattcacaattatttagcatggtatcagcagaaacagggaaaatctcctcagctcctggtctataatgcaaaaaccttagcagatggtgtgccatcaaggttcagtggcagtggatcaggaacacaatattctctcaagatcaacagcctgcagcctgaagattttgggagttattactgtcaacatttttggagtactccgtacacgttcggaggggggaccaagcttgagatcaaa

SEQ ID NO: 1958 - protein, 499 aa, Mus sp.
EVQLLESGGGLVQPGGSLKLSCAASGFDFSTYWMSWVRQAPGKGLEWIGEINPDSSTINYTPSLKDKFIISRDNAKNTLYLQMNKVRSDDTALYYCAGGYYRYPYYYTMDYWGQGTTVTVSSGGGGSGGGGSGGGGSELVMTQSPSSLSASVGETVTITCRASGNIHNYLAWYQQKQGKSPQLLVYNAKTLADGVPSRFSGSGSGTQYSLKINSLQPEDFGSYYCQHFWSTPYTFGGGTKLEIKSGGGGSEVQLVESGGGLVQPGGSLKLSCAASGFTFNKYAMNWVRQAPGKGLEWVARIRSKYNNYATYYADSVKDRFTISRDDSKNTAYLQMNNLKTEDTAVYYCVRHGNFGNSYISYWAYWGQGTLVTVSSGGGGSGGGGSGGGGSQTVVTQEPSLTVSPGGTVTLTCGSSTGAVTSGNYPNWVQQKPGQAPRGLIGGTKFLAPGTPARFSGSLLGGKAALTLSGVQPEDEAEYYCVLWYSNRWVFGGGTKLTVL

SEQ ID NO: 1959 - DNA, 1497 bp, Mus sp.
gaggtgcagctgctcgagtctggaggtggcctggtgcagcctggaggatccctgaaactctcctgtgcagcctcaggattcgattttagtacatactggatgagttgggtccggcaggctccagggaaagggctagaatggattggagaaattaatccagatagcagtacgataaactatacgccatctctaaaggataaattcatcatctccagagacaacgccaaaaatacgctgtacctgcaaatgaacaaagtgagatctgacgacacagccctttattactgtgcaggaggatactataggtacccatattactatactatggactactggggccaagggaccacggtcaccgtctcctcaggtggtggtggttctggcggcggcggctccggtggtggtggttctgagctcgtgatgacacagtctccatcctccttatctgcatctgtgggagaaactgtcaccatcacatgtcgagcaagtgggaatattcacaattatttagcatggtatcagcagaaacagggaaaatctcctcagctcctggtctataatgcaaaaaccttagcagatggtgtgccatcaaggttcagtggcagtggatcaggaacacaatattctctcaagatcaacagcctgcagcctgaagattttgggagttattactgtcaacatttttggagtactccgtacacgttcggaggggggaccaagcttgagatcaaatccggaggtggtggatccgaggtgcagctggtcgagtctggaggaggattggtgcagcctggagggtcattgaaactctcatgtgcagcctctggattcaccttcaataagtacgccatgaactgggtccgccaggctccaggaaagggtttggaatgggttgctcgcataagaagtaaatataataattatgcaacatattatgccgattcagtgaaagacaggttcaccatctccagagatgattcaaaaaacactgcctatctacaaatgaacaacttgaaaactgaggacactgccgtgtactactgtgtgagacatgggaacttcggtaatagctacatatcctactgggcttactggggccaagggactctggtcaccgtctcctcaggtggtggtggttctggcggcggcggctccggtggtggtggttctcagactgttgtgactcaggaaccttcactcaccgtatcacctggtggaacagtcacactcacttgtggctcctcgactggggctgttacatctggcaactacccaaactgggtccaacaaaaaccaggtcaggcaccccgtggtctaataggtgggactaagttcctcgcccccggtactcctgccagattctcaggctccctgcttggaggcaaggctgccctcaccctctcaggggtacagccagaggatgaggcagaatattactgtgttctatggtacagcaaccgctgggtgttcggtggaggaaccaaactgactgtccta

SEQ ID NO: 1960 - protein, 122 aa, Mus sp.
EVQLLESGGGLVQPGGSLNLSCAASGFDFSTYWMSWVRQAPGKGLEWIGEINPDSSTINYTPSLKDKFIISRDNAKNTLYLQMNKVRSDDTALYYCAGGYYRYPYYYTMDYWGQGTTVTVSS

SEQ ID NO: 1961 - protein, 5 aa, Mus sp.
TYWMS

SEQ ID NO: 1962 - protein, 17 aa, Mus sp.
EINPDSSTINYTPSLKD

SEQ ID NO: 1963 - protein, 13 aa, Mus sp.
GYYRYPYYYTMDY

SEQ ID NO: 1964 - DNA, 366 bp, Mus sp.
gaggtgcagctgctcgagtctggaggtggcctggtgcagcctggaggatccctgaatctctcctgtgcagcctcaggattcgattttagtacatactggatgagttgggtccggcaggctccagggaaagggctagaatggattggagaaattaatccagatagcagtacgataaactatacgccatctctaaaggataaattcatcatctccagagacaacgccaaaaatacgctgtacctgcaaatgaacaaagtgagatctgacgacacagccctttattactgtgcaggaggatactataggtacccatattactatactatggactactggggccaagggaccacggtcaccgtctcctca

SEQ ID NO: 1965 - protein, 107 aa, Mus sp.; identical to SEQ ID NO: 1895

SEQ ID NO: 1966 - protein, 11 aa, Mus sp.
RASGNIHNYLA

SEQ ID NO: 1967 - protein, 7 aa, Mus sp.
NAKTLAD

SEQ ID NO: 1968 - protein, 9 aa, Mus sp.
QHFWSTPYT

SEQ ID NO: 1969 - DNA, 321 bp, Mus sp.
gagctccagatgacccagtctccagcctccctatctgcatctgtgggagaaactgtcaccatcacatgtcgagcaagtgggaatattcacaattatttagcatggtatcagcagaaacagggaaaatctcctcagctcctggtctataatgcaaaaaccttagcagatggtgtgccatcaaggttcagtggcagtggatcaggaacacaatattctctcaagatcaacagcctgcagcctgaagattttgggagttattactgtcaacatttttggagtactccgtacacgttcggaggggggaccaagcttgagatcaaa

SEQ ID NO: 1970 - protein, 244 aa, Mus sp.
EVQLLESGGGLVQPGGSLNLSCAASGFDFSTYWMSWVRQAPGKGLEWIGEINPDSSTINYTPSLKDKFIISRDNAKNTLYLQMNKVRSDDTALYYCAGGYYRYPYYYTMDYWGQGTTVTVSSGGGGSGGGGSGGGGSELQMTQSPASLSASVGETVTITCRASGNIHNYLAWYQQKQGKSPQLLVYNAKTLADGVPSRFSGSGSGTQYSLKINSLQPEDFGSYYCQHFWSTPYTFGGGTKLEIK

SEQ ID NO: 1971 - DNA, 732 bp, Mus sp.
gaggtgcagctgctcgagtctggaggtggcctggtgcagcctggaggatccctgaatctctcctgtgcagcctcaggattcgattttagtacatactggatgagttgggtccggcaggctccagggaaagggctagaatggattggagaaattaatccagatagcagtacgataaactatacgccatctctaaaggataaattcatcatctccagagacaacgccaaaaatacgctgtacctgcaaatgaacaaagtgagatctgacgacacagccctttattactgtgcaggaggatactataggtacccatattactatactatggactactggggccaagggaccacggtcaccgtctcctcaggtggtggtggttctggcggcggcggctccggtggtggtggttctgagctccagatgacccagtctccagcctccctatctgcatctgtgggagaaactgtcaccatcacatgtcgagcaagtgggaatattcacaattatttagcatggtatcagcagaaacagggaaaatctcctcagctcctggtctataatgcaaaaaccttagcagatggtgtgccatcaaggttcagtggcagtggatcaggaacacaatattctctcaagatcaacagcctgcagcctgaagattttgggagttattactgtcaacatttttggagtactccgtacacgttcggaggggggaccaagcttgagatcaaa

SEQ ID NO: 1972 - protein, 499 aa, Mus sp.
EVQLLESGGGLVQPGGSLNLSCAASGFDFSTYWMSWVRQAPGKGLEWIGEINPDSSTINYTPSLKDKFIISRDNAKNTLYLQMNKVRSDDTALYYCAGGYYRYPYYYTMDYWGQGTTVTVSSGGGGSGGGGSGGGGSELQMTQSPASLSASVGETVTITCRASGNIHNYLAWYQQKQGKSPQLLVYNAKTLADGVPSRFSGSGSGTQYSLKINSLQPEDFGSYYCQHFWSTPYTFGGGTKLEIKSGGGGSEVQLVESGGGLVQPGGSLKLSCAASGFTFNKYAMNWVRQAPGKGLEWVARIRSKYNNYATYYADSVKDRFTISRDDSKNTAYLQMNNLKTEDTAVYYCVRHGNFGNSYISYWAYWGQGTLVTVSSGGGGSGGGGSGGGGSQTVVTQEPSLTVSPGGTVTLTCGSSTGAVTSGNYPNWVQQKPGQAPRGLIGGTKFLAPGTPARFSGSLLGGKAALTLSGVQPEDEAEYYCVLWYSNRWVFGGGTKLTVL

SEQ ID NO: 1973 - DNA, 1497 bp, Mus sp.
gaggtgcagctgctcgagtctggaggtggcctggtgcagcctggaggatccctgaatctctcctgtgcagcctcaggattcgattttagtacatactggatgagttgggtccggcaggctccagggaaagggctagaatggattggagaaattaatccagatagcagtacgataaactatacgccatctctaaaggataaattcatcatctccagagacaacgccaaaaatacgctgtacctgcaaatgaacaaagtgagatctgacgacacagccctttattactgtgcaggaggatactataggtacccatattactatactatggactactggggccaagggaccacggtcaccgtctcctcaggtggtggtggttctggcggcggcggctccggtggtggtggttctgagctccagatgacccagtctccagcctccctatctgcatctgtgggagaaactgtcaccatcacatgtcgagcaagtgggaatattcacaattatttagcatggtatcagcagaaacagggaaaatctcctcagctcctggtctataatgcaaaaaccttagcagatggtgtgccatcaaggttcagtggcagtggatcaggaacacaatattctctcaagatcaacagcctgcagcctgaagattttgggagttattactgtcaacatttttggagtactccgtacacgttcggaggggggaccaagcttgagatcaaatccggaggtggtggatccgaggtgcagctggtcgagtctggaggaggattggtgcagcctggagggtcattgaaactctcatgtgcagcctctggattcaccttcaataagtacgccatgaactgggtccgccaggctccaggaaagggtttggaatgggttgctcgcataagaagtaaatataataattatgcaacatattatgccgattcagtgaaagacaggttcaccatctccagagatgattcaaaaaacactgcctatctacaaatgaacaacttgaaaactgaggacactgccgtgtactactgtgtgagacatgggaacttcggtaatagctacatatcctactgggcttactggggccaagggactctggtcaccgtctcctcaggtggtggtggttctggcggcggcggctccggtggtggtggttctcagactgttgtgactcaggaaccttcactcaccgtatcacctggtggaacagtcacactcacttgtggctcctcgactggggctgttacatctggcaactacccaaactgggtccaacaaaaaccaggtcaggcaccccgtggtctaataggtgggactaagttcctcgcccccggtactcctgccagattctcaggctccctgcttggaggcaaggctgccctcaccctctcaggggtacagccagaggatgaggcagaatattactgtgttctatggtacagcaaccgctgggtgttcggtggaggaaccaaactgactgtccta

SEQ ID NO: 1974 - protein, 122 aa, Mus sp.
EVQLLESGGGLVQPGGSLKLSCAASGFDFSTYWMSWVRQAPGKGLEWIGEINPDSSTVNYTPSLKDKFIISRDNAKNTLYLQMTKVRSEDTALYYCAGGYYRYPYYYTMDYWGQGTTVTVSS

SEQ ID NO: 1975 - protein, 5 aa, Mus sp.
TYWMS

SEQ ID NO: 1976 - protein, 17 aa, Mus sp.
EINPDSSTVNYTPSLKD

SEQ ID NO: 1977 - protein, 13 aa, Mus sp.
GYYRYPYYYTMDY

SEQ ID NO: 1978 - DNA, 366 bp, Mus sp.
gaggtgcagctgctcgagtctggaggtggcctggtgcagcctggaggatccctgaaactctcctgtgcagcctcaggattcgattttagtacatactggatgagttgggtccggcaggctccagggaaagggctagaatggattggagaaattaatccagatagcagtacggtaaactatacgccatctctaaaggataaattcatcatctccagagacaacgccaaaaatacgctgtacctgcaaatgaccaaagtgagatctgaggacacagccctttattactgtgcaggaggatactataggtacccatattactatactatggactactggggccaagggaccacggtcaccgtctcctca

SEQ ID NO: 1979 - protein, 107 aa, Mus sp.; identical to SEQ ID NO: 1895

SEQ ID NO: 1980 - protein, 11 aa, Mus sp.
RASGNIHNYLA

SEQ ID NO: 1981 - protein, 7 aa, Mus sp.
NAKTLAD

SEQ ID NO: 1982 - protein, 9 aa, Mus sp.
QHFWSTPYT

SEQ ID NO: 1983 - DNA, 321 bp, Mus sp.; identical to SEQ ID NO: 1969

SEQ ID NO: 1984 - protein, 244 aa, Mus sp.
EVQLLESGGGLVQPGGSLKLSCAASGFDFSTYWMSWVRQAPGKGLEWIGEINPDSSTVNYTPSLKDKFIISRDNAKNTLYLQMTKVRSEDTALYYCAGGYYRYPYYYTMDYWGQGTTVTVSSGGGGSGGGGSGGGGSELQMTQSPASLSASVGETVTITCRASGNIHNYLAWYQQKQGKSPQLLVYNAKTLADGVPSRFSGSGSGTQYSLKINSLQPEDFGSYYCQHFWSTPYTFGGGTKLEIK

SEQ ID NO: 1985 - DNA, 732 bp, Mus sp.
gaggtgcagctgctcgagtctggaggtggcctggtgcagcctggaggatccctgaaactctcctgtgcagcctcaggattcgattttagtacatactggatgagttgggtccggcaggctccagggaaagggctagaatggattggagaaattaatccagatagcagtacggtaaactatacgccatctctaaaggataaattcatcatctccagagacaacgccaaaaatacgctgtacctgcaaatgaccaaagtgagatctgaggacacagccctttattactgtgcaggaggatactataggtacccatattactatactatggactactggggccaagggaccacggtcaccgtctcctcaggtggtggtggttctggcggcggcggctccggtggtggtggttctgagctccagatgacccagtctccagcctccctatctgcatctgtgggagaaactgtcaccatcacatgtcgagcaagtgggaatattcacaattatttagcatggtatcagcagaaacagggaaaatctcctcagctcctggtctataatgcaaaaaccttagcagatggtgtgccatcaaggttcagtggcagtggatcaggaacacaatattctctcaagatcaacagcctgcagcctgaagattttgggagttattactgtcaacatttttggagtactccgtacacgttcggaggggggaccaagcttgagatcaaa

SEQ ID NO: 1986 - protein, 499 aa, Mus sp.
EVQLLESGGGLVQPGGSLKLSCAASGFDFSTYWMSWVRQAPGKGLEWIGEINPDSSTVNYTPSLKDKFIISRDNAKNTLYLQMTKVRSEDTALYYCAGGYYRYPYYYTMDYWGQGTTVTVSSGGGGSGGGGSGGGGSELQMTQSPASLSASVGETVTITCRASGNIHNYLAWYQQKQGKSPQLLVYNAKTLADGVPSRFSGSGSGTQYSLKINSLQPEDFGSYYCQHFWSTPYTFGGGTKLEIKSGGGGSEVQLVESGGGLVQPGGSLKLSCAASGFTFNKYAMNWVRQAPGKGLEWVARIRSKYNNYATYYADSVKDRFTISRDDSKNTAYLQMNNLKTEDTAVYYCVRHGNFGNSYISYWAYWGQGTLVTVSSGGGGSGGGGSGGGGSQTVVTQEPSLTVSPGGTVTLTCGSSTGAVTSGNYPNWVQQKPGQAPRGLIGGTKFLAPGTPARFSGSLLGGKAALTLSGVQPEDEAEYYCVLWYSNRWVFGGGTKLTVL

SEQ ID NO: 1987 - DNA, 1497 bp, Mus sp.
gaggtgcagctgctcgagtctggaggtggcctggtgcagcctggaggatccctgaaactctcctgtgcagcctcaggattcgattttagtacatactggatgagttgggtccggcaggctccagggaaagggctagaatggattggagaaattaatccagatagcagtacggtaaactatacgccatctctaaaggataaattcatcatctccagagacaacgccaaaaatacgctgtacctgcaaatgaccaaagtgagatctgaggacacagccctttattactgtgcaggaggatactataggtacccatattactatactatggactactggggccaagggaccacggtcaccgtctcctcaggtggtggtggttctggcggcggcggctccggtggtggtggttctgagctccagatgacccagtctccagcctccctatctgcatctgtgggagaaactgtcaccatcacatgtcgagcaagtgggaatattcacaattatttagcatggtatcagcagaaacagggaaaatctcctcagctcctggtctataatgcaaaaaccttagcagatggtgtgccatcaaggttcagtggcagtggatcaggaacacaatattctctcaagatcaacagcctgcagcctgaagattttgggagttattactgtcaacatttttggagtactccgtacacgttcggaggggggaccaagcttgagatcaaatccggaggtggtggatccgaggtgcagctggtcgagtctggaggaggattggtgcagcctggagggtcattgaaactctcatgtgcagcctctggattcaccttcaataagtacgccatgaactgggtccgccaggctccaggaaagggtttggaatgggttgctcgcataagaagtaaatataataattatgcaacatattatgccgattcagtgaaagacaggttcaccatctccagagatgattcaaaaaacactgcctatctacaaatgaacaacttgaaaactgaggacactgccgtgtactactgtgtgagacatgggaacttcggtaatagctacatatcctactgggcttactggggccaagggactctggtcaccgtctcctcaggtggtggtggttctggcggcggcggctccggtggtggtggttctcagactgttgtgactcaggaaccttcactcaccgtatcacctggtggaacagtcacactcacttgtggctcctcgactggggctgttacatctggcaactacccaaactgggtccaacaaaaaccaggtcaggcaccccgtggtctaataggtgggactaagttcctcgcccccggtactcctgccagattctcaggctccctgcttggaggcaaggctgccctcaccctctcaggggtacagccagaggatgaggcagaatattactgtgttctatggtacagcaaccgctgggtgttcggtggaggaaccaaactgactgtccta

SEQ ID NO: 1988 - DNA, 4104 bp, Artificial Sequence
  human IGF-R1 construct
atgaagtctggctccggcggagggtccccgacctcgctgtgggggctcctgtttctctccgccgcgctctcgctctggccgacgagtggagaaatctgcgggccaggcatcgacatccgcaacgactatcagcagctgaagcgcctggagaactgcacggtgatcgagggctacctccacatcctgctcatctccaaggccgaggactaccgcagctaccgcttccccaagctcacggtcattaccgagtacttgctgctgttccgagtggctggcctcgagagcctcggagacctcttccccaacctcacggtcatccgcggctggaaactcttctacaactacgccctggtcatcttcgagatgaccaatctcaaggatattgggctttacaacctgaggaacattactcggggggccatcaggattgagaaaaatgctgacctctgttacctctccactgtggactggtccctgatcctggatgcggtgtccaataactacattgtggggaataagcccccaaaggaatgtggggacctgtgtccagggaccatggaggagaagccgatgtgtgagaagaccaccatcaacaatgagtacaactaccgctgctggaccacaaaccgctgccagaaaatgtgcccaagcacgtgtgggaagcgggcgtgcaccgagaacaatgagtgctgccaccccgagtgcctgggcagctgcagcgcgcctgacaacgacacggcctgtgtagcttgccgccactactactatgccggtgtctgtgtgcctgcctgcccgcccaacacctacaggtttgagggctggcgctgtgtggaccgtgacttctgcgccaacatcctcagcgccgagagcagcgactccgaggggtttgtgatccacgacggcgagtgcatgcaggagtgcccctcgggcttcatccgcaacggcagccagagcatgtactgcatcccttgtgaaggtccttgcccgaaggtctgtgaggaagaaaagaaaacaaagaccattgattctgttacttctgctcagatgctccaaggatgcaccatcttcaagggcaatttgctcattaacatccgacgggggaataacattgcttcagagctggagaacttcatggggctcatcgaggtggtgacgggctacgtgaagatccgccattctcatgccttggtctccttgtccttcctaaaaaaccttcgcctcatcctaggagaggagcagctagaagggaattactccttctacgtcctcgacaaccagaacttgcagcaactgtgggactgggaccaccgcaacctgaccatcaaagcagggaaaatgtactttgctttcaatcccaaattatgtgtttccgaaatttaccgcatggaggaagtgacggggactaaagggcgccaaagcaaaggggacataaacaccaggaacaacggggagagagcctcctgtgaaagtgacgtcctgcatttcacctccaccaccacgtcgaagaatcgcatcatcataacctggcaccggtaccggccccctgactacagggatctcatcagcttcaccgtttactacaaggaagcaccctttaagaatgtcacagagtatgatgggcaggatgcctgcggctccaacagctggaacatggtggacgtggacctcccgcccaacaaggacgtggagcccggcatcttactacatgggctgaagccctggactcagtacgccgtttacgtcaaggctgtgaccctcaccatggtggagaacgaccatatccgtggggccaagagtgagatcttgtacattcgcaccaatgcttcagttccttccattcccttggacgttctttcagcatcgaactcctcttctcagttaatcgtgaagtggaaccctccctctctgcccaacggcaacctgagttactacattgtgcgctggcagcggcagcctcaggacggctacctttaccggcacaattactgctccaaagacaaaatccccatcaggaagtatgccgacggcaccatcgacattgaggaggtcacagagaaccccaagactgaggtgtgtggtggggagaaagggccttgctgcgcctgccccaaaactgaagccgagaagcaggccgagaaggaggaggctgaataccgcaaagtctttgagaatttcctgcacaactccatcttcgtgcccagacctgaaaggaagcggagagatgtcatgcaagtggccaacaccaccatgtccagccgaagcaggaacaccacggccgcagacacctacaacatcaccgacccggaagagctggagacagagtaccctttctttgagagcagagtggataacaaggagagaactgtcatttctaaccttcggcctttcacattgtaccgcatcgatatccacagctgcaaccacgaggctgagaagctgggctgcagcgcctccaacttcgtctttgcaaggactatgcccgcagaaggagcagatgacattcctgggccagtgacctgggagccaaggcctgaaaactccatctttttaaagtggccggaacctgagaatcccaatggattgattctaatgtatgaaataaaatacggatcacaagttgaggatcagcgagaatgtgtgtccagacaggaatacaggaagtatggaggggccaagctaaaccggctaaacccggggaactacacagcccggattcaggccacatctctctctgggaatgggtcgtggacagatcctgtgttcttctatgtccaggccaaaacaggatatgaaaacttcatccatctgatcatcgctctgcccgtcgctgtcctgttgatcgtgggagggttggtgattatgctgtacgtcttccatagaaagagaaataacagcaggctggggaatggagtgctgtatgcctctgtgaacccggagtacttcagcgctgctgatgtgtacgttcctgatgagtgggaggtggctcgggagaagatcaccatgagccgggaacttgggcaggggtcgtttgggatggtctatgaaggagttgccaagggtgtggtgaaagatgaacctgaaaccagagtggccattaaaacagtgaacgaggccgcaagcatgcgtgagaggattgagtttctcaacgaagcttctgtgatgaaggagttcaattgtcaccatgtggtgcgattgctgggtgtggtgtcccaaggccagccaacactggtcatcatggaactgatgacacggggcgatctcaaaagttatctccggtctctgaggccagaaatggagaataatccagtcctagcacctccaagcctgagcaagatgattcagatggccggagagattgcagacggcatggcatacctcaacgccaataagttcgtccacagagaccttgctgcccggaattgcatggtagccgaagatttcacagtcaaaatcggagattttggtatgacgcgagatatctatgagacagactattaccggaaaggagggaaagggctgctgcccgtgcgctggatgtctcctgagtccctcaaggatggagtcttcaccacttactcggacgtctggtccttcggggtcgtcctctgggagatcgccacactggccgagcagccctaccagggcttgtccaacgagcaagtccttcgcttcgtcatggagggcggccttctggacaagccagacaactgtcctgacatgctgtttgaactgatgcgcatgtgctggcagtataaccccaagatgaggccttccttcctggagatcatcagcagcatcaaagaggagatggagcctggcttccgggaggtctccttctactacagcgaggagaacaagctgcccgagccggaggagctggacctggagccagagaacatggagagcgtccccctggacccctcggcctcctcgtcctccctgccactgcccgacagacactcaggacacaaggccgagaacggccccggccctggggtgctggtcctccgcgccagcttcgacgagagacagccttacgcccacatgaacgggggccgcaagaacgagcgggccttgccgctgccccagtcttcgacctgctga

SEQ ID NO: 1989 - protein, 1367 aa, Artificial Sequence
  human IGF-R1 construct
MKSGSGGGSPTSLWGLLFLSAALSLWPTSGEICGPGIDIRNDYQQLKRLENCTVIEGYLHILLISKAEDYRSYRFPKLTVITEYLLLFRVAGLESLGDLFPNLTVIRGWKLFYNYALVIFEMTNLKDIGLYNLRNITRGAIRIEKNADLCYLSTVDWSLILDAVSNNYIVGNKPPKECGDLCPGTMEEKPMCEKTTINNEYNYRCWTTNRCQKMCPSTCGKRACTENNECCHPECLGSCSAPDNDTACVACRHYYYAGVCVPACPPNTYRFEGWRCVDRDFCANILSAESSDSEGFVIHDGECMQECPSGFIRNGSQSMYCIPCEGPCPKVCEEEKKTKTIDSVTSAQMLQGCTIFKGNLLINIRRGNNIASELENFMGLIEVVTGYVKIRHSHALVSLSFLKNLRLILGEEQLEGNYSFYVLDNQNLQQLWDWDHRNLTIKAGKMYFAFNPKLCVSEIYRMEEVTGTKGRQSKGDINTRNNGERASCESDVLHFTSTTTSKNRIIITWHRYRPPDYRDLISFTVYYKEAPFKNVTEYDGQDACGSNSWNMVDVDLPPNKDVEPGILLHGLKPWTQYAVYVKAVTLTMVENDHIRGAKSEILYIRTNASVPSIPLDVLSASNSSSQLIVKWNPPSLPNGNLSYYIVRWQRQPQDGYLYRHNYCSKDKIPIRKYADGTIDIEEVTENPKTEVCGGEKGPCCACPKTEAEKQAEKEEAEYRKVFENFLHNSIFVPRPERKRRDVMQVANTTMSSRSRNTTAADTYNITDPEELETEYPFFESRVDNKERTVISNLRPFTLYRIDIHSCNHEAEKLGCSASNFVFARTMPAEGADDIPGPVTWEPRPENSIFLKWPEPENPNGLILMYEIKYGSQVEDQRECVSRQEYRKYGGAKLNRLNPGNYTARIQATSLSGNGSWTDPVFFYVQAKTGYENFIHLIIALPVAVLLIVGGLVIMLYVFHRKRNNSRLGNGVLYASVNPEYFSAADVYVPDEWEVAREKITMSRELGQGSFGMVYEGVAKGVVKDEPETRVAIKTVNEAASMRERIEFLNEASVMKEFNCHHVVRLLGVVSQGQPTLVIMELMTRGDLKSYLRSLRPEMENNPVLAPPSLSKMIQMAGEIADGMAYLNANKFVHRDLAARNCMVAEDFTVKIGDFGMTRDIYETDYYRKGGKGLLPVRWMSPESLKDGVFTTYSDVWSFGVVLWEIATLAEQPYQGLSNEQVLRFVMEGGLLDKPDNCPDMLFELMRMCWQYNPKMRPSFLEIISSIKEEMEPGFREVSFYYSEENKLPEPEELDLEPENMESVPLDPSASSSSLPLPDRHSGHKAENGPGPGVLVLRASFDERQPYAHMNGGRKNERALPLPQSSTC

SEQ ID NO: 1990 - DNA, 3531 bp, Artificial Sequence
  soluble fusion protein of h IGF-R1 and m IgG1 Fc
atgaagtctggctccggcggagggtccccgacctcgctgtgggggctcctgtttctctccgccgcgctctcgctctggccgacgagtggagaaatctgcgggccaggcatcgacatccgcaacgactatcagcagctgaagcgcctggagaactgcacggtgatcgagggctacctccacatcctgctcatctccaaggccgaggactaccgcagctaccgcttccccaagctcacggtcattaccgagtacttgctgctgttccgagtggctggcctcgagagcctcggagacctcttccccaacctcacggtcatccgcggctggaaactcttctacaactacgccctggtcatcttcgagatgaccaatctcaaggatattgggctttacaacctgaggaacattactcggggggccatcaggattgagaaaaatgctgacctctgttacctctccactgtggactggtccctgatcctggatgcggtgtccaataactacattgtggggaataagcccccaaaggaatgtggggacctgtgtccagggaccatggaggagaagccgatgtgtgagaagaccaccatcaacaatgagtacaactaccgctgctggaccacaaaccgctgccagaaaatgtgcccaagcacgtgtgggaagcgggcgtgcaccgagaacaatgagtgctgccaccccgagtgcctgggcagctgcagcgcgcctgacaacgacacggcctgtgtagcttgccgccactactactatgccggtgtctgtgtgcctgcctgcccgcccaacacctacaggtttgagggctggcgctgtgtggaccgtgacttctgcgccaacatcctcagcgccgagagcagcgactccgaggggtttgtgatccacgacggcgagtgcatgcaggagtgcccctcgggcttcatccgcaacggcagccagagcatgtactgcatcccttgtgaaggtccttgcccgaaggtctgtgaggaagaaaagaaaacaaagaccattgattctgttacttctgctcagatgctccaaggatgcaccatcttcaagggcaatttgctcattaacatccgacgggggaataacattgcttcagagctggagaacttcatggggctcatcgaggtggtgacgggctacgtgaagatccgccattctcatgccttggtctccttgtccttcctaaaaaaccttcgcctcatcctaggagaggagcagctagaagggaattactccttctacgtcctcgacaaccagaacttgcagcaactgtgggactgggaccaccgcaacctgaccatcaaagcagggaaaatgtactttgctttcaatcccaaattatgtgtttccgaaatttaccgcatggaggaagtgacggggactaaagggcgccaaagcaaaggggacataaacaccaggaacaacggggagagagcctcctgtgaaagtgacgtcctgcatttcacctccaccaccacgtcgaagaatcgcatcatcataacctggcaccggtaccggccccctgactacagggatctcatcagcttcaccgtttactacaaggaagcaccctttaagaatgtcacagagtatgatgggcaggatgcctgcggctccaacagctggaacatggtggacgtggacctcccgcccaacaaggacgtggagcccggcatcttactacatgggctgaagccctggactcagtacgccgtttacgtcaaggctgtgaccctcaccatggtggagaacgaccatatccgtggggccaagagtgagatcttgtacattcgcaccaatgcttcagttccttccattcccttggacgttctttcagcatcgaactcctcttctcagttaatcgtgaagtggaaccctccctctctgcccaacggcaacctgagttactacattgtgcgctggcagcggcagcctcaggacggctacctttaccggcacaattactgctccaaagacaaaatccccatcaggaagtatgccgacggcaccatcgacattgaggaggtcacagagaaccccaagactgaggtgtgtggtggggagaaagggccttgctgcgcctgccccaaaactgaagccgagaagcaggccgagaaggaggaggctgaataccgcaaagtctttgagaatttcctgcacaactccatcttcgtgcccagacctgaaaggaagcggagagatgtcatgcaagtggccaacaccaccatgtccagccgaagcaggaacaccacggccgcagacacctacaacatcaccgacccggaagagctggagacagagtaccctttctttgagagcagagtggataacaaggagagaactgtcatttctaaccttcggcctttcacattgtaccgcatcgatatccacagctgcaaccacgaggctgagaagctgggctgcagcgcctccaacttcgtctttgcaaggactatgcccgcagaaggagcagatgacattcctgggccagtgacctgggagccaaggcctgaaaactccatctttttaaagtggccggaacctgagaatcccaatggattgattctaatgtatgaaataaaatacggatcacaagttgaggatcagcgagaatgtgtgtccagacaggaatacaggaagtatggaggggccaagctaaaccggctaaacccggggaactacacagcccggattcaggccacatctctctctgggaatgggtcgtggacagatcctgtgttcttctatgtccaggccaaaacaggatatgaaaacttcatccattccggaggtggtggatccgtgcccagggattgtggttgtaagccttgcatatgtacagtcccagaagtatcatctgtcttcatcttccccccaaagcccaaggatgtgctcaccattactctgactcctaaggtcacgtgtgttgtggtagacatcagcaaggatgatcccgaggtccagttcagctggtttgtagatgatgtggaggtgcacacagctcagacgaaaccccgggaggagcagatcaacagcactttccgttcagtcagtgaacttcccatcatgcaccaggactggctcaatggcaaggagttcaaatgcagggtcaacagtgcagctttccctgcccccatcgagaaaaccatctccaaaaccaaaggcagaccgaaggctccacaggtgtacaccattccacctcccaaggagcagatggccaaggataaagtcagtctgacctgcatgataacaaacttcttccctgaagacattactgtggagtggcagtggaatgggcagccagcggagaactacaagaacactcagcccatcatggacacagatggctcttacttcgtctacagcaagctcaatgtgcagaagagcaactgggaggcaggaaatactttcacctgctctgtgttacatgagggcctgcacaaccaccatactgagaagagcctctcccactctcctggtaaatccgggcatcatcaccatcatcattga

SEQ ID NO: 1991 - protein, 1176 aa, Artificial Sequence
  soluble fusion protein of h IGF-R1 and m IgG1 Fc
MKSGSGGGSPTSLWGLLFLSAALSLWPTSGEICGPGIDIRNDYQQLKRLENCTVIEGYLHILLISKAEDYRSYRFPKLTVITEYLLLFRVAGLESLGDLFPNLTVIRGWKLFYNYALVIFEMTNLKDIGLYNLRNITRGAIRIEKNADLCYLSTVDWSLILDAVSNNYIVGNKPPKECGDLCPGTMEEKPMCEKTTINNEYNYRCWTTNRCQKMCPSTCGKRACTENNECCHPECLGSCSAPDNDTACVACRHYYYAGVCVPACPPNTYRFEGWRCVDRDFCANILSAESSDSEGFVIHDGECMQECPSGFIRNGSQSMYCIPCEGPCPKVCEEEKKTKTIDSVTSAQMLQGCTIFKGNLLINIRRGNNIASELENFMGLIEVVTGYVKIRHSHALVSLSFLKNLRLILGEEQLEGNYSFYVLDNQNLQQLWDWDHRNLTIKAGKMYFAFNPKLCVSEIYRMEEVTGTKGRQSKGDINTRNNGERASCESDVLHFTSTTTSKNRIIITWHRYRPPDYRDLISFTVYYKEAPFKNVTEYDGQDACGSNSWNMVDVDLPPNKDVEPGILLHGLKPWTQYAVYVKAVTLTMVENDHIRGAKSEILYIRTNASVPSIPLDVLSASNSSSQLIVKWNPPSLPNGNLSYYIVRWQRQPQDGYLYRHNYCSKDKIPIRKYADGTIDIEEVTENPKTEVCGGEKGPCCACPKTEAEKQAEKEEAEYRKVFENFLHNSIFVPRPERKRRDVMQVANTTMSSRSRNTTAADTYNITDPEELETEYPFFESRVDNKERTVISNLRPFTLYRIDIHSCNHEAEKLGCSASNFVFARTMPAEGADDIPGPVTWEPRPENSIFLKWPEPENPNGLILMYEIKYGSQVEDQRECVSRQEYRKYGGAKLNRLNPGNYTARIQATSLSGNGSWTDPVFFYVQAKTGYENFIHSGGGGSVPRDCGCKPCICTVPEVSSVFIFPPKPKDVLTITLTPKVTCVVVDISKDDPEVQFSWFVDDVEVHTAQTKPREEQINSTFRSVSELPIMHQDWLNGKEFKCRVNSAAFPAPIEKTISKTKGRPKAPQVYTIPPPKEQMAKDKVSLTCMITNFFPEDITVEWQWNGQPAENYKNTQPIMDTDGSYFVYSKLNVQKSNWEAGNTFTCSVLHEGLHNHHTEKSLSHSPGKSGHHHHHH

SEQ ID NO: 1992 - DNA, 4101 bp, Artificial Sequence
  murine IGF-R1 construct
atgggatggagctgtatcatcctcttcttggtagcaacagctacaggtgtacactccgattacaaggacgacgatgacaaggaaatctgtgggcccggcattgacatccgcaacgactatcagcagctgaagcgcctggaaaactgcacggtgatcgagggcttcctccacatcctgctcatctccaaggccgaggactaccgaagctaccgcttccccaagctcaccgtcatcactgagtacttgctgctcttccgagtcgctggcctcgagagcctgggagacctcttccccaacctcacagtcatccgtggctggaaactcttctacaactacgcactggtcatcttcgagatgaccaatctcaaggatattgggctttataatctgaggaacattactcggggggccatcaggattgagaagaacgccgacctctgttacctctccaccatagactggtctctcatcttggatgcggtgtccaataactacattgtggggaacaagcccccgaaggaatgtggggacctgtgtccagggacattggaggagaagcccatgtgtgagaagaccaccatcaacaatgagtacaactaccgctgctggaccacaaatcgctgccagaaaatgtgcccaagtgtgtgcgggaagcgagcctgcaccgagaacaacgagtgctgccacccggagtgcctgggcagctgccacacaccggacgacaacacaacctgcgtggcctgcagacactactactacaaaggcgtgtgtgtgcctgcctgcccgcctggcacctacaggttcgagggctggcgctgtgtggatcgcgatttctgcgccaacatccccaacgctgagagcagtgactcggatggcttcgttatccacgacgatgagtgcatgcaggagtgtccctcaggcttcatccgcaacagcacccagagcatgtactgtatcccctgcgaaggcccctgccccaaagtctgcggcgatgaagagaagaaaacgaaaaccatcgattcggtgacttctgctcaaatgctccaaggatgcaccatcctgaagggcaatctgcttattaacatccggagaggcaataacattgcctcggagttggagaacttcatggggctcatcgaggtggtgaccggctacgtgaagatccgccattctcatgccttggtctccttgtccttcctgaagaaccttcgtctcatcttaggagaggagcagctggaagggaactactccttctatgtcctagacaaccagaacttgcagcagctgtgggactggaaccaccggaacctgaccgtcaggtccggaaagatgtactttgctttcaatcccaagctgtgtgtctccgaaatttaccgcatggaggaagtgaccggaaccaagggacgccagagcaaaggggacataaacaccaggaacaacggagagcgagcttcctgtgaaagtgatgttctccgtttcacctccaccacgacctggaagaaccgaatcatcataacgtggcaccggtaccggccgccggactaccgggatctcatcagcttcacagtttactacaaggaggcaccatttaaaaacgttacggaatatgacgggcaggatgcctgtggctccaacagctggaacatggtggatgtagacctgcctccgaacaaggagggcgagcctggcattttactgcatgggctgaagccctggacccagtatgctgtctatgtcaaggctgtgaccctcaccatggtggaaaacgaccatatccgtggggccaaaagtgaaatcttgtacattcgcaccaatgcttcagtcccttccattcccctagatgtcctctcagcatcaaactcttcctctcagctgattgtgaagtggaatcctccaactctgcccaatggtaacttgagttactacattgtgaggtggcagcggcagccccaggatggttacctgtaccggcacaactactgctccaaagacaaaatacccatcagaaagtacgccgatggtaccatcgacgtggaggaggtgacggaaaatcccaagacagaagtgtgtggtggtgataaagggccatgctgcgcttgccctaaaactgaagctgagaagcaggctgagaaggaggaggctgagtaccgtaaagtctttgagaatttccttcacaattccatctttgtgcccaggcccgaaaggaggcggagagacgtcatgcaagtggccaacacgaccatgtccagccgaagcaggaacaccacggtagctgacacctacaatatcacagacccggaggagttcgagacagagtaccctttctttgagagcagagtggataacaaggagaggactgtcatctccaacctccggcctttcactctgtaccgcatcgatatccacagctgcaaccacgaggctgagaagctgggctgcagcgcctccaacttcgtctttgcgagaaccatgccagcagaaggagcagatgatatccctggtccggtgacctgggagccaagacccgaaaactccatctttttaaagtggccagaacccgagaaccccaacggattgatcctaatgtatgaaattaaatacgggtcgcaagtcgaggatcagcgggaatgtgtgtccagacaggagtacaggaagtacggaggggccaaactcaaccgtctaaacccagggaactatacagcccggattcaggctacctccctctctgggaatgggtcatggacagatcctgtgttcttctatgtccccgccaaaacgacgtatgagaacttcatgcatctgatcattgctctgccggttgccatcctgctgatcgttggggggctggttatcatgctgtatgtcttccatagaaagagaaataacagcaggttgggcaatggagtgctgtatgcttctgtgaaccccgagtatttcagcgcagctgatgtgtacgtgcctgatgaatgggaggtagctcgagagaagatcaccatgaaccgggagctcggacaagggtcctttgggatggtctatgaaggagtggccaagggtgtggtcaaggatgaacccgaaaccagagtggccatcaagacggtaaacgaggctgcaagtatgcgtgaaagaatcgagtttctcaacgaggcctcggtgatgaaggagttcaattgtcaccatgtggtccggttgctgggtgtggtatcccaaggccagcccaccctggtcatcatggaactaatgacacgcggtgatctcaaaagttatctccggtctctgaggccagaagtggagcagaataatctagtcctcattcctccgagcttaagcaagatgatccagatggctggagagattgcagatggcatggcctacctcaatgccaacaagttcgtccacagagaccttgctgctaggaactgcatggtagccgaagatttcacagtcaaaattggagatttcggtatgacacgagacatctacgagacggactactaccggaaaggcgggaaggggttgctgcctgtgcgctggatgtctcccgagtccctcaaggatggtgtcttcactactcattctgatgtctggtccttcggggtcgtcctctgggagatcgccacgctggctgagcagccctaccagggcttgtccaacgagcaagttcttcgtttcgtcatggagggtggccttctggacaagccggacaactgccctgatatgctgtttgaacttatgcgcatgtgctggcagtataaccccaagatgcggccctccttcctggagatcatcggcagcatcaaggatgagatggagcccagcttccaggaggtctccttctactacagcgaggagaacaagcctcccgagccagaggagctggagatggagcctgagaacatggagagcgtcccactggacccttcggcctcctcagcctccctgcctctgcctgaaagacactcaggacacaaggctgagaatggcccgggccctggcgtgctcgttctccgcgccagttttgatgagagacagccttacgctcacatgaacgggggacgcgccaacgagagggccttgcctctgccccagtcctcgacctgctga

SEQ ID NO: 1993 - protein, 1366 aa, Artificial Sequence
  murine IGF-R1 construct
MGWSCIILFLVATATGVHSDYKDDDDKEICGPGIDIRNDYQQLKRLENCTVIEGFLHILLISKAEDYRSYRFPKLTVITEYLLLFRVAGLESLGDLFPNLTVIRGWKLFYNYALVIFEMTNLKDIGLYNLRNITRGAIRIEKNADLCYLSTIDWSLILDAVSNNYIVGNKPPKECGDLCPGTLEEKPMCEKTTINNEYNYRCWTTNRCQKMCPSVCGKRACTENNECCHPECLGSCHTPDDNTTCVACRHYYYKGVCVPACPPGTYRFEGWRCVDRDFCANIPNAESSDSDGFVIHDDECMQECPSGFIRNSTQSMYCIPCEGPCPKVCGDEEKKTKTIDSVTSAQMLQGCTILKGNLLINIRRGNNIASELENFMGLIEVVTGYVKIRHSHALVSLSFLKNLRLILGEEQLEGNYSFYVLDNQNLQQLWDWNHRNLTVRSGKMYFAFNPKLCVSEIYRMEEVTGTKGRQSKGDINTRNNGERASCESDVLRFTSTTTWKNRIIITWHRYRPPDYRDLISFTVYYKEAPFKNVTEYDGQDACGSNSWNMVDVDLPPNKEGEPGILLHGLKPWTQYAVYVKAVTLTMVENDHIRGAKSEILYIRTNASVPSIPLDVLSASNSSSQLIVKWNPPTLPNGNLSYYIVRWQRQPQDGYLYRHNYCSKDKIPIRKYADGTIDVEEVTENPKTEVCGGDKGPCCACPKTEAEKQAEKEEAEYRKVFENFLHNSIFVPRPERRRRDVMQVANTTMSSRSRNTTVADTYNITDPEEFETEYPFFESRVDNKERTVISNLRPFTLYRIDIHSCNHEAEKLGCSASNFVFARTMPAEGADDIPGPVTWEPRPENSIFLKWPEPENPNGLILMYEIKYGSQVEDQRECVSRQEYRKYGGAKLNRLNPGNYTARIQATSLSGNGSWTDPVFFYVPAKTTYENFMHLIIALPVAILLIVGGLVIMLYVFHRKRNNSRLGNGVLYASVNPEYFSAADVYVPDEWEVAREKITMNRELGQGSFGMVYEGVAKGVVKDEPETRVAIKTVNEAASMRERIEFLNEASVMKEFNCHHVVRLLGVVSQGQPTLVIMELMTRGDLKSYLRSLRPEVEQNNLVLIPPSLSKMIQMAGEIADGMAYLNANKFVHRDLAARNCMVAEDFTVKIGDFGMTRDIYETDYYRKGGKGLLPVRWMSPESLKDGVFTTHSDVWSFGVVLWEIATLAEQPYQGLSNEQVLRFVMEGGLLDKPDNCPDMLFELMRMCWQYNPKMRPSFLEIIGSIKDEMEPSFQEVSFYYSEENKPPEPEELEMEPENMESVPLDPSASSASLPLPERHSGHKAENGPGPGVLVLRASFDERQPYAHMNGGRANERALPLPQSSTC

SEQ ID NO: 1994 - DNA, 4095 bp, Artificial Sequence
  mutated human IGF-R1 antigen
atgggatggagctgtatcatcctcttcttggtagcaacagctacaggtgtacactccgattacaaggacgacgatgacaaggaaatctgtgggcccggcattgacatccgcaacgactatcagcagctgaagcgcctggaaaactgcacggtgatcgagggcttcctccacatcctgctcatctccaaggccgaggactaccgaagctaccgcttccccaagctcaccgtcatcactgagtacttgctgctcttccgagtcgctggcctcgagagcctgggagacctcttccccaacctcacagtcatccgtggctggaaactcttctacaactacgcactggtcatcttcgagatgaccaatctcaaggatattgggctttataatctgaggaacattactcggggggccatcaggattgagaagaacgccgacctctgttacctctccaccatagactggtctctcatcttggatgcggtgtccaataactacattgtggggaacaagcccccgaaggaatgtggggacctgtgtccagggacattggaggagaagcccatgtgtgagaagaccaccatcaacaatgagtacaactaccgctgctggaccacaaatcgctgccagaaaatgtgcccaagtgtgtgcgggaagcgagcctgcaccgagaacaacgagtgctgccacccggagtgcctgggcagctgccacacaccggacgacaacacaacctgcgtggcctgcagacactactactacaaaggcgtgtgtgtgcctgcctgcccgcctggcacctacaggttcgagggctggcgctgtgtggatcgcgatttctgcgccaacatccccaacgctgagagcagtgactcggatggcttcgttatccacgacgatgagtgcatgcaggagtgtccctcaggcttcatccgcaacagcacccagagcatgtactgtatcccctgcgaaggcccctgccccaaggtctgtgaggaagaaaagaaaacaaagaccattgattctgttacttctgctcagatgctccaaggatgcaccatcttcaagggcaatttgctcattaacatccgacgggggaataacattgcttcagagctggagaacttcatggggctcatcgaggtggtgacgggctacgtgaagatccgccattctcatgccttggtctccttgtccttcctaaaaaaccttcgcctcatcctaggagaggagcagctagaagggaattactccttctacgtcctcgacaaccagaacttgcagcaactgtgggactgggaccaccgcaacctgaccatcaaagcagggaaaatgtactttgctttcaatcccaaattatgtgtttccgaaatttaccgcatggaggaagtgacggggactaaagggcgccaaagcaaaggggacataaacaccaggaacaacggggagagagcctcctgtgaaagtgacgtcctgcatttcacctccaccaccacgtcgaagaatcgcatcatcataacctggcaccggtaccggccccctgactacagggatctcatcagcttcaccgtttactacaaggaagcaccctttaagaatgtcacagagtatgatgggcaggatgcctgcggctccaacagctggaacatggtggacgtggacctcccgcccaacaaggacgtggagcccggcatcttactacatgggctgaagccctggactcagtacgccgtttacgtcaaggctgtgaccctcaccatggtggagaacgaccatatccgtggggccaagagtgagatcttgtacattcgcaccaatgcttcagttccttccattcccttggacgttctttcagcatcgaactcctcttctcagttaatcgtgaagtggaaccctccctctctgcccaacggcaacctgagttactacattgtgcgctggcagcggcagcctcaggacggctacctttaccggcacaattactgctccaaagacaaaatccccatcaggaagtatgccgacggcaccatcgacattgaggaggtcacagagaaccccaagactgaggtgtgtggtggggagaaagggccttgctgcgcctgccccaaaactgaagccgagaagcaggccgagaaggaggaggctgaataccgcaaagtctttgagaatttcctgcacaactccatcttcgtgcccagacctgaaaggaagcggagagatgtcatgcaagtggccaacaccaccatgtccagccgaagcaggaacaccacggccgcagacacctacaacatcaccgacccggaagagctggagacagagtaccctttctttgagagcagagtggataacaaggagagaactgtcatttctaaccttcggcctttcacattgtaccgcatcgatatccacagctgcaaccacgaggctgagaagctgggctgcagcgcctccaacttcgtctttgcaaggactatgcccgcagaaggagcagatgacattcctgggccagtgacctgggagccaaggcctgaaaactccatctttttaaagtggccggaacctgagaatcccaatggattgattctaatgtatgaaataaaatacggatcacaagttgaggatcagcgagaatgtgtgtccagacaggaatacaggaagtatggaggggccaagctaaaccggctaaacccggggaactacacagcccggattcaggccacatctctctctgggaatgggtcgtggacagatcctgtgttcttctatgtccaggccaaaacaggatatgaaaacttcatccatctgatcatcgctctgcccgtcgctgtcctgttgatcgtgggagggttggtgattatgctgtacgtcttccatagaaagagaaataacagcaggctggggaatggagtgctgtatgcctctgtgaacccggagtacttcagcgctgctgatgtgtacgttcctgatgagtgggaggtggctcgggagaagatcaccatgagccgggaacttgggcaggggtcgtttgggatggtctatgaaggagttgccaagggtgtggtgaaagatgaacctgaaaccagagtggccattaaaacagtgaacgaggccgcaagcatgcgtgagaggattgagtttctcaacgaagcttctgtgatgaaggagttcaattgtcaccatgtggtgcgattgctgggtgtggtgtcccaaggccagccaacactggtcatcatggaactgatgacacggggcgatctcaaaagttatctccggtctctgaggccagaaatggagaataatccagtcctagcacctccaagcctgagcaagatgattcagatggccggagagattgcagacggcatggcatacctcaacgccaataagttcgtccacagagaccttgctgcccggaattgcatggtagccgaagatttcacagtcaaaatcggagattttggtatgacgcgagatatctatgagacagactattaccggaaaggagggaaagggctgctgcccgtgcgctggatgtctcctgagtccctcaaggatggagtcttcaccacttactcggacgtctggtccttcggggtcgtcctctgggagatcgccacactggccgagcagccctaccagggcttgtccaacgagcaagtccttcgcttcgtcatggagggcggccttctggacaagccagacaactgtcctgacatgctgtttgaactgatgcgcatgtgctggcagtataaccccaagatgaggccttccttcctggagatcatcagcagcatcaaagaggagatggagcctggcttccgggaggtctccttctactacagcgaggagaacaagctgcccgagccggaggagctggacctggagccagagaacatggagagcgtccccctggacccctcggcctcctcgtcctccctgccactgcccgacagacactcaggacacaaggccgagaacggccccggccctggggtgctggtcctccgcgccagcttcgacgagagacagccttacgcccacatgaacgggggccgcaagaacgagcgggccttgccgctgccccagtcttcgacctgctga

SEQ ID NO: 1995 - protein, 1364 aa, Artificial Sequence
  mutated human IGF-R1 antigen
MGWSCIILFLVATATGVHSDYKDDDDKEICGPGIDIRNDYQQLKRLENCTVIEGFLHILLISKAEDYRSYRFPKLTVITEYLLLFRVAGLESLGDLFPNLTVIRGWKLFYNYALVIFEMTNLKDIGLYNLRNITRGAIRIEKNADLCYLSTIDWSLILDAVSNNYIVGNKPPKECGDLCPGTLEEKPMCEKTTINNEYNYRCWTTNRCQKMCPSVCGKRACTENNECCHPECLGSCHTPDDNTTCVACRHYYYKGVCVPACPPGTYRFEGWRCVDRDFCANIPNAESSDSDGFVIHDDECMQECPSGFIRNSTQSMYCIPCEGPCPKVCEEEKKTKTIDSVTSAQMLQGCTIFKGNLLINIRRGNNIASELENFMGLIEVVTGYVKIRHSHALVSLSFLKNLRLILGEEQLEGNYSFYVLDNQNLQQLWDWDHRNLTIKAGKMYFAFNPKLCVSEIYRMEEVTGTKGRQSKGDINTRNNGERASCESDVLHFTSTTTSKNRIIITWHRYRPPDYRDLISFTVYYKEAPFKNVTEYDGQDACGSNSWNMVDVDLPPNKDVEPGILLHGLKPWTQYAVYVKAVTLTMVENDHIRGAKSEILYIRTNASVPSIPLDVLSASNSSSQLIVKWNPPSLPNGNLSYYIVRWQRQPQDGYLYRHNYCSKDKIPIRKYADGTIDIEEVTENPKTEVCGGEKGPCCACPKTEAEKQAEKEEAEYRKVFENFLHNSIFVPRPERKRRDVMQVANTTMSSRSRNTTAADTYNITDPEELETEYPFFESRVDNKERTVISNLRPFTLYRIDIHSCNHEAEKLGCSASNFVFARTMPAEGADDIPGPVTWEPRPENSIFLKWPEPENPNGLILMYEIKYGSQVEDQRECVSRQEYRKYGGAKLNRLNPGNYTARIQATSLSGNGSWTDPVFFYVQAKTGYENFIHLIIALPVAVLLIVGGLVIMLYVFHRKRNNSRLGNGVLYASVNPEYFSAADVYVPDEWEVAREKITMSRELGQGSFGMVYEGVAKGVVKDEPETRVAIKTVNEAASMRERIEFLNEASVMKEFNCHHVVRLLGVVSQGQPTLVIMELMTRGDLKSYLRSLRPEMENNPVLAPPSLSKMIQMAGEIADGMAYLNANKFVHRDLAARNCMVAEDFTVKIGDFGMTRDIYETDYYRKGGKGLLPVRWMSPESLKDGVFTTYSDVWSFGVVLWEIATLAEQPYQGLSNEQVLRFVMEGGLLDKPDNCPDMLFELMRMCWQYNPKMRPSFLEIISSIKEEMEPGFREVSFYYSEENKLPEPEELDLEPENMESVPLDPSASSSSLPLPDRHSGHKAENGPGPGVLVLRASFDERQPYAHMNGGRKNERALPLPQSSTC

SEQ ID NO: 1996 - DNA, 4101 bp, Artificial Sequence
  mutated murine IGF-R1 antigen
atgggatggagctgtatcatcctcttcttggtagcaacagctacaggtgtacactccgattacaaggacgacgatgacaaggaaatctgcgggccaggcatcgacatccgcaacgactatcagcagctgaagcgcctggagaactgcacggtgatcgagggctacctccacatcctgctcatctccaaggccgaggactaccgcagctaccgcttccccaagctcacggtcattaccgagtacttgctgctgttccgagtggctggcctcgagagcctcggagacctcttccccaacctcacggtcatccgcggctggaaactcttctacaactacgccctggtcatcttcgagatgaccaatctcaaggatattgggctttacaacctgaggaacattactcggggggccatcaggattgagaaaaatgctgacctctgttacctctccactgtggactggtccctgatcctggatgcggtgtccaataactacattgtggggaataagcccccaaaggaatgtggggacctgtgtccagggaccatggaggagaagccgatgtgtgagaagaccaccatcaacaatgagtacaactaccgctgctggaccacaaaccgctgccagaaaatgtgcccaagcacgtgtgggaagcgggcgtgcaccgagaacaatgagtgctgccaccccgagtgcctgggcagctgcagcgcgcctgacaacgacacggcctgtgtagcttgccgccactactactatgccggtgtctgtgtgcctgcctgcccgcccaacacctacaggtttgagggctggcgctgtgtggaccgtgacttctgcgccaacatcctcagcgccgagagcagcgactccgaggggtttgtgatccacgacggcgagtgcatgcaggagtgcccctcgggcttcatccgcaacggcagccagagcatgtactgcatcccttgtgaaggtccttgcccgaaagtctgcggcgatgaagagaagaaaacgaaaaccatcgattcggtgacttctgctcaaatgctccaaggatgcaccatcctgaagggcaatctgcttattaacatccggagaggcaataacattgcctcggagttggagaacttcatggggctcatcgaggtggtgaccggctacgtgaagatccgccattctcatgccttggtctccttgtccttcctgaagaaccttcgtctcatcttaggagaggagcagctggaagggaactactccttctatgtcctagacaaccagaacttgcagcagctgtgggactggaaccaccggaacctgaccgtcaggtccggaaagatgtactttgctttcaatcccaagctgtgtgtctccgaaatttaccgcatggaggaagtgaccggaaccaagggacgccagagcaaaggggacataaacaccaggaacaacggagagcgagcttcctgtgaaagtgatgttctccgtttcacctccaccacgacctggaagaaccgaatcatcataacgtggcaccggtaccggccgccggactaccgggatctcatcagcttcacagtttactacaaggaggcaccatttaaaaacgttacggaatatgacgggcaggatgcctgtggctccaacagctggaacatggtggatgtagacctgcctccgaacaaggagggcgagcctggcattttactgcatgggctgaagccctggacccagtatgctgtctatgtcaaggctgtgaccctcaccatggtggaaaacgaccatatccgtggggccaaaagtgaaatcttgtacattcgcaccaatgcttcagtcccttccattcccctagatgtcctctcagcatcaaactcttcctctcagctgattgtgaagtggaatcctccaactctgcccaatggtaacttgagttactacattgtgaggtggcagcggcagccccaggatggttacctgtaccggcacaactactgctccaaagacaaaatacccatcagaaagtacgccgatggtaccatcgacgtggaggaggtgacggaaaatcccaagacagaagtgtgtggtggtgataaagggccatgctgcgcttgccctaaaactgaagctgagaagcaggctgagaaggaggaggctgagtaccgtaaagtctttgagaatttccttcacaattccatctttgtgcccaggcccgaaaggaggcggagagacgtcatgcaagtggccaacacgaccatgtccagccgaagcaggaacaccacggtagctgacacctacaatatcacagacccggaggagttcgagacagagtaccctttctttgagagcagagtggataacaaggagaggactgtcatctccaacctccggcctttcactctgtaccgcatcgatatccacagctgcaaccacgaggctgagaagctgggctgcagcgcctccaacttcgtctttgcgagaaccatgccagcagaaggagcagatgatatccctggtccggtgacctgggagccaagacccgaaaactccatctttttaaagtggccagaacccgagaaccccaacggattgatcctaatgtatgaaattaaatacgggtcgcaagtcgaggatcagcgggaatgtgtgtccagacaggagtacaggaagtacggaggggccaaactcaaccgtctaaacccagggaactatacagcccggattcaggctacctccctctctgggaatgggtcatggacagatcctgtgttcttctatgtccccgccaaaacgacgtatgagaacttcatgcatctgatcattgctctgccggttgccatcctgctgatcgttggggggctggttatcatgctgtatgtcttccatagaaagagaaataacagcaggttgggcaatggagtgctgtatgcttctgtgaaccccgagtatttcagcgcagctgatgtgtacgtgcctgatgaatgggaggtagctcgagagaagatcaccatgaaccgggagctcggacaagggtcctttgggatggtctatgaaggagtggccaagggtgtggtcaaggatgaacccgaaaccagagtggccatcaagacggtaaacgaggctgcaagtatgcgtgaaagaatcgagtttctcaacgaggcctcggtgatgaaggagttcaattgtcaccatgtggtccggttgctgggtgtggtatcccaaggccagcccaccctggtcatcatggaactaatgacacgcggtgatctcaaaagttatctccggtctctgaggccagaagtggagcagaataatctagtcctcattcctccgagcttaagcaagatgatccagatggctggagagattgcagatggcatggcctacctcaatgccaacaagttcgtccacagagaccttgctgctaggaactgcatggtagccgaagatttcacagtcaaaattggagatttcggtatgacacgagacatctacgagacggactactaccggaaaggcgggaaggggttgctgcctgtgcgctggatgtctcccgagtccctcaaggatggtgtcttcactactcattctgatgtctggtccttcggggtcgtcctctgggagatcgccacgctggctgagcagccctaccagggcttgtccaacgagcaagttcttcgtttcgtcatggagggtggccttctggacaagccggacaactgccctgatatgctgtttgaacttatgcgcatgtgctggcagtataaccccaagatgcggccctccttcctggagatcatcggcagcatcaaggatgagatggagcccagcttccaggaggtctccttctactacagcgaggagaacaagcctcccgagccagaggagctggagatggagcctgagaacatggagagcgtcccactggacccttcggcctcctcagcctccctgcctctgcctgaaagacactcaggacacaaggctgagaatggcccgggccctggcgtgctcgttctccgcgccagttttgatgagagacagccttacgctcacatgaacgggggacgcgccaacgagagggccttgcctctgccccagtcctcgacctgctga

SEQ ID NO: 1997 - protein, 1366 aa, Artificial Sequence
  mutated murine IGF-R1 antigen
MGWSCIILFLVATATGVHSDYKDDDDKEICGPGIDIRNDYQQLKRLENCTVIEGYLHILLISKAEDYRSYRFPKLTVITEYLLLFRVAGLESLGDLFPNLTVIRGWKLFYNYALVIFEMTNLKDIGLYNLRNITRGAIRIEKNADLCYLSTVDWSLILDAVSNNYIVGNKPPKECGDLCPGTMEEKPMCEKTTINNEYNYRCWTTNRCQKMCPSTCGKRACTENNECCHPECLGSCSAPDNDTACVACRHYYYAGVCVPACPPNTYRFEGWRCVDRDFCANILSAESSDSEGFVIHDGECMQECPSGFIRNGSQSMYCIPCEGPCPKVCGDEEKKTKTIDSVTSAQMLQGCTILKGNLLINIRRGNNIASELENFMGLIEVVTGYVKIRHSHALVSLSFLKNLRLILGEEQLEGNYSFYVLDNQNLQQLWDWNHRNLTVRSGKMYFAFNPKLCVSEIYRMEEVTGTKGRQSKGDINTRNNGERASCESDVLRFTSTTTWKNRIIITWHRYRPPDYRDLISFTVYYKEAPFKNVTEYDGQDACGSNSWNMVDVDLPPNKEGEPGILLHGLKPWTQYAVYVKAVTLTMVENDHIRGAKSEILYIRTNASVPSIPLDVLSASNSSSQLIVKWNPPTLPNGNLSYYIVRWQRQPQDGYLYRHNYCSKDKIPIRKYADGTIDVEEVTENPKTEVCGGDKGPCCACPKTEAEKQAEKEEAEYRKVFENFLHNSIFVPRPERRRRDVMQVANTTMSSRSRNTTVADTYNITDPEEFETEYPFFESRVDNKERTVISNLRPFTLYRIDIHSCNHEAEKLGCSASNFVFARTMPAEGADDIPGPVTWEPRPENSIFLKWPEPENPNGLILMYEIKYGSQVEDQRECVSRQEYRKYGGAKLNRLNPGNYTARIQATSLSGNGSWTDPVFFYVPAKTTYENFMHLIIALPVAILLIVGGLVIMLYVFHRKRNNSRLGNGVLYASVNPEYFSAADVYVPDEWEVAREKITMNRELGQGSFGMVYEGVAKGVVKDEPETRVAIKTVNEAASMRERIEFLNEASVMKEFNCHHVVRLLGVVSQGQPTLVIMELMTRGDLKSYLRSLRPEVEQNNLVLIPPSLSKMIQMAGEIADGMAYLNANKFVHRDLAARNCMVAEDFTVKIGDFGMTRDIYETDYYRKGGKGLLPVRWMSPESLKDGVFTTHSDVWSFGVVLWEIATLAEQPYQGLSNEQVLRFVMEGGLLDKPDNCPDMLFELMRMCWQYNPKMRPSFLEIIGSIKDEMEPSFQEVSFYYSEENKPPEPEELEMEPENMESVPLDPSASSASLPLPERHSGHKAENGPGPGVLVLRASFDERQPYAHMNGGRANERALPLPQSSTC

SEQ ID NO: 1998 - DNA, 4104 bp, Artificial Sequence
  macaque IGF-R1
atgaagtctggctctggagaagggtccccgacctcgctgtgggggctcctgtttctctccgccgcgctctcgctctggccgacgagtggagaaatctgtgggccgggcatcgacatccgcaacgactatcagcagctgaagcgcctggagaactgcacggtgatcgagggctacctccacatcctgctcatctccaaggccgaggactaccgcagctaccgcttccccaagctcacggtcatcaccgagtacttgctgttgttccgagtggctggcctagagagcctcggagacctgttccccaacctcacggtaatccgcggctggaaactcttctacaactacgccctggtcatctttgagatgaccaatctcaaggatattgggctttacaacctgaggaacattactcggggggccatcaggattgagaaaaatgctgacctctgttacctctccactgtggactggtccctgatcctggatgcagtgtccaataactacattgtggggaataagcccccaaaggaatgcggggacctgtgtccggggaccatggaggagaagccgatgtgcgagaagaccaccatcaacaatgagtacaactaccgctgctggaccacaaaccgctgccagaaaatgtgcccgagtgcctgtgggaagagggcatgcaccgagaacaacgagtgctgccaccccgagtgcctgggcagctgcagcgcgcctgacaacgacacggcctgtgtagcttgccgccactactactacgccggtgtctgcgtgcctgcctgcccgcccaacacctacaggtttgagggctggcgctgtgtggaccgtgacttctgcgccaacatcctcagcgccgagagcagcgactccgagggtttcgtgatccacgacggcgagtgcatgcaggagtgcccctcaggcttcatccgcaacggcagccagagcatgtactgcatcccttgtgaaggtccttgccccaaggtctgtgaggaagaaaagaaaacaaagaccattgattctgttacttctgctcagatgctccaaggatgcaccatcttcaagggcaatttgctcattaacatccgacgggggaataacattgcttcagaactggagaacttcatggggctcatcgaggtggtgacgggctacgtgaagatccgccattcccatgccttggtctccttgtccttcctaaaaaaccttcgcctcatcttaggagaggagcagctagaagggaattactccttctacgtcctcgacaaccagaacttgcagcaactatgggactgggaccaccgcaacctgaccatcaaagcagggaaaatgtactttgctttcaatcccaaattgtgtgtttcggaaatttaccgcatggaggaagtgacggggactaaagggcgccaaagcaaaggggacataaacaccaggaacaacggggaaagagcctcctgtgaaagtgacgtcctgcatttcacctccaccaccacgtggaagaatcgcatcatcataacctggcaccggtaccggccccctgactacagggatctcatcagcttcaccgtttactacaaggaagcaccttttaagaatgtcacggagtatgatgggcaggatgcctgcggctccaacagctggaacatggtggatgtggacctcccgcccaacaaggacgtggagcccggcatcttactgcatgggctgaagccctggactcagtacgccgtttacgtcaaggctgtgaccctcaccatggtggagaacgaccatatccgtggggccaagagtgagatcttgtacattcgcaccaatgcttcagttccttccattcccttggacgttctttcagcatcgaactcctcttctcagttaatcgtgaagtggaaccctccctctctgcccaacggcaacctgagttactacattgtgcgctggcagcggcagcctcaggacggctacctttaccggcacaattactgctccaaagacaaaatccccatcaggaagtatgccgacggcaccattgacattgaggaggtcacagagaacccgaagactgaggtgtgtggtggagagaaagggccttgctgcgcctgccccaaaactgaagctgagaagcaggccgagaaggaggaggctgagtaccgcaaagtctttgagaatttcctgcacaactccatctttgtgcccagacctgaaaggaagcggagagatgtcatgcaagtggccaacaccaccatgtccagccgaagcaggaacaccacggtggcagacacctacaacatcacagatctggaagagctagagacagagtaccctttctttgagagcagagtggataataaggagagaactgtcatttctaaccttcggcctttcacattgtaccgcattgatatccacagctgcaaccacgaggctgagaaactgggctgcagcgcctccaactttgtctttgcaaggactatgcctgcagaaggagcagatgacattcctgggccagtgacctgggagccaaggcctgaaaactccatctttttaaagtggccagaacctgagaatcccaatggattgattctaatgtatgaaataaaatacggatcacaagttgaggatcagcgagaatgtgtgtccagacaggaatacaggaagtatggaggggccaagctaaaccggctaaacccagggaactacacagcccggattcaggctacatctctctctgggaatgggtcgtggacagatcctgtgttcttctatgtccaggccaaaacaggatatgaaaacttcatccatctgatcatcgctctgcccgtcgctgtcctgttgatcgtgggagggttggtgatcatgctgtacgtcttccatagaaagagaaataacagcaggctggggaatggagtgctgtacgcgtctgtgaacccggagtacttcagcgctgcggatgtgtacgttcctgatgagtgggaggtggctcgggagaagatcaccatgagccgggaacttgggcaggggtcgtttgggatggtctatgaaggagttgccaagggtgtggtgaaagacgaacctgaaaccagagtggccattaaaacagtgaacgaggccgcgagcatgcgtgaaaggatcgagtttctcaacgaggcttctgtgatgaaggagttcaattgtcaccatgtggtgcggttgctgggtgtggtgtcccagggccagccaacgctggtcatcatggaactgatgacgcggggcgatctcaaaagttatctccggtctctgaggccagaaatggagaataatccagtcctagcacctccaagcctaagcaagatgattcagatggctggagagattgcagacggcatggcatacctcaacgccaacaagttcgtccacagagaccttgctgcccggaattgcatggtagccgaggatttcacagtcaaaattggagattttgggatgacgcgagatatctatgagacagactattaccggaaaggagggaaagggctgttgcccgtgcgctggatgtctcccgagtccctcaaggatggagtcttcaccacttactcggacgtctggtccttcggggttgtcctctgggagatcgccacactggccgagcagccctaccagggcttgtccaacgagcaagtccttcgcttcgtcatggagggcggccttctggacaagccagacaactgccccgacatgctgtttgaattgatgcgcatgtgctggcagtacaaccccaagatgaggccttccttcctggagatcatcagcagcatcaaagacgagatggagcctggcttccgggaggtctccttctactacagtgaggagaacaagctgcccgagccggaggagctggacctggagccagagaacatggagagcgtccccctggacccctcggcctcctcgtcctccctgccactgcccgacagacactcaggacacaaggccgagaacggccccggccctggagtgctggtgctccgcgccagcttcgatgagagacagccttacgcacacatgaacggtggccgcaagaacgagcgggccttgccgctgccccagtcttcgacctgctga

SEQ ID NO: 1999 - protein, 1367 aa, Artificial Sequence
  macaque IGF-R1
MKSGSGEGSPTSLWGLLFLSAALSLWPTSGEICGPGIDIRNDYQQLKRLENCTVIEGYLHILLISKAEDYRSYRFPKLTVITEYLLLFRVAGLESLGDLFPNLTVIRGWKLFYNYALVIFEMTNLKDIGLYNLRNITRGAIRIEKNADLCYLSTVDWSLILDAVSNNYIVGNKPPKECGDLCPGTMEEKPMCEKTTINNEYNYRCWTTNRCQKMCPSACGKRACTENNECCHPECLGSCSAPDNDTACVACRHYYYAGVCVPACPPNTYRFEGWRCVDRDFCANILSAESSDSEGFVIHDGECMQECPSGFIRNGSQSMYCIPCEGPCPKVCEEEKKTKTIDSVTSAQMLQGCTIFKGNLLINIRRGNNIASELENFMGLIEVVTGYVKIRHSHALVSLSFLKNLRLILGEEQLEGNYSFYVLDNQNLQQLWDWDHRNLTIKAGKMYFAFNPKLCVSEIYRMEEVTGTKGRQSKGDINTRNNGERASCESDVLHFTSTTTWKNRIIITWHRYRPPDYRDLISFTVYYKEAPFKNVTEYDGQDACGSNSWNMVDVDLPPNKDVEPGILLHGLKPWTQYAVYVKAVTLTMVENDHIRGAKSEILYIRTNASVPSIPLDVLSASNSSSQLIVKWNPPSLPNGNLSYYIVRWQRQPQDGYLYRHNYCSKDKIPIRKYADGTIDIEEVTENPKTEVCGGEKGPCCACPKTEAEKQAEKEEAEYRKVFENFLHNSIFVPRPERKRRDVMQVANTTMSSRSRNTTVADTYNITDLEELETEYPFFESRVDNKERTVISNLRPFTLYRIDIHSCNHEAEKLGCSASNFVFARTMPAEGADDIPGPVTWEPRPENSIFLKWPEPENPNGLILMYEIKYGSQVEDQRECVSRQEYRKYGGAKLNRLNPGNYTARIQATSLSGNGSWTDPVFFYVQAKTGYENFIHLIIALPVAVLLIVGGLVIMLYVFHRKRNNSRLGNGVLYASVNPEYFSAADVYVPDEWEVAREKITMSRELGQGSFGMVYEGVAKGVVKDEPETRVAIKTVNEAASMRERIEFLNEASVMKEFNCHHVVRLLGVVSQGQPTLVIMELMTRGDLKSYLRSLRPEMENNPVLAPPSLSKMIQMAGEIADGMAYLNANKFVHRDLAARNCMVAEDFTVKIGDFGMTRDIYETDYYRKGGKGLLPVRWMSPESLKDGVFTTYSDVWSFGVVLWEIATLAEQPYQGLSNEQVLRFVMEGGLLDKPDNCPDMLFELMRMCWQYNPKMRPSFLEIISSIKDEMEPGFREVSFYYSEENKLPEPEELDLEPENMESVPLDPSASSSSLPLPDRHSGHKAENGPGPGVLVLRASFDERQPYAHMNGGRKNERALPLPQSSTC

SEQ ID NO: 2000 - protein, 362 aa, Homo sapiens
PAIYKVFPNSAPLEGGTRLTICGWDFGFRRNNKFDLKKTRVLLGNESCTLTLSESTMNTLKCTVGPAMNKHFNMSIIISNGHGTTQYSTFSYVDPVITSISPKYGPMAGGTLLTLTGNYLNSGNSRHISIGGKTCTLKSVSNSILECYTPAQTISTEFAVKLKIDLANRETSIFSYREDPIVYEIHPTKSFISGGSTITGVGKNLNSVSVPRMVINVHEAGRNFTVACQHRSNSEIICCTTPSLQQLNLQLPLKTKAFFMLDGILSKYFDLIYVHNPVFKPFEKPVMISMGNENVLEIKGNDIDPEAVKGEVLKVGNKSCENIHLHSEAVLCTVPNDLLKLNSELNIEWKQAISSTVLGKVI

SEQ ID NO: 2001 - protein, 42 aa, Homo sapiens
CRHFQSCSQCLSAPPFVQCGWCHDKCVRSEECLSGTWTQQIC

SEQ ID NO: 2002 - protein, 212 aa, Homo sapiens
STKKEVFNILQAAYVSKPGAQLARQIGASLNDDILFGVFAQSKPDSAEPMDRSAMCAFPIKYVNDFFNKIVNKNNVRCLQHFYGPNHEHCFNRTLLRNSSGCEARRDEYRTEFTTALQRVDLFMGQFSEVLLTSISTFIKGDLTIANLGTSEGRFMQVVVSRSGPSTPHVNFLLDSHPVSPEVIVEHTLNQNGYTLVITGKKITKIPLNGLG

SEQ ID NO: 2003 - protein, 907 aa, Homo sapiens
ECKEALAKSEMNVNMKYQLPNFTAETPIQNVILHEHHIFLGATNYIYVLNEEDLQKVAEYKTGPVLEHPDCFPCQDCSSKANLSGGVWKDNINMALVVDTYYDDQLISCGSVNRGTCQRHVFPHNHTADIQSEVHCIFSPQIEEPSQCPDCVVSALGAKVLSSVKDRFINFFVGNTINSSYFPDHPLHSISVRRLKETKDGFMFLTDQSYIDVLPEFRDSYPIKYVHAFESNNFIYFLTVQRETLDAQTFHTRIIRFCSINSGLHSYMEMPLECILTEKRKKRSTKKEVFNILQAAYVSKPGAQLARQIGASLNDDILFGVFAQSKPDSAEPMDRSAMCAFPIKYVNDFFNKIVNKNNVRCLQHFYGPNHEHCFNRTLLRNSSGCEARRDEYRTEFTTALQRVDLFMGQFSEVLLTSISTFIKGDLTIANLGTSEGRFMQVVVSRSGPSTPHVNFLLDSHPVSPEVIVEHTLNQNGYTLVITGKKITKIPLNGLGCRHFQSCSQCLSAPPFVQCGWCHDKCVRSEECLSGTWTQQICLPAIYKVFPNSAPLEGGTRLTICGWDFGFRRNNKFDLKKTRVLLGNESCTLTLSESTMNTLKCTVGPAMNKHFNMSIIISNGHGTTQYSTFSYVDPVITSISPKYGPMAGGTLLTLTGNYLNSGNSRHISIGGKTCTLKSVSNSILECYTPAQTISTEFAVKLKIDLANRETSIFSYREDPIVYEIHPTKSFISGGSTITGVGKNLNSVSVPRMVINVHEAGRNFTVACQHRSNSEIICCTTPSLQQLNLQLPLKTKAFFMLDGILSKYFDLIYVHNPVFKPFEKPVMISMGNENVLEIKGNDIDPEAVKGEVLKVGNKSCENIHLHSEAVLCTVPNDLLKLNSELNIEWKQAISSTVLGKVIVQPDQNF

SEQ ID NO: 2004 - protein, 326 aa, Homo sapiens
ASQDLGDELLDDGEDEEDEDEAWKAFNGGWTEMPGILWMEPTQPPDFALAYRPSFPEDREPQIPYPEPTWPPPLSAPRVPYHSSVLSVTRPVVVSATHPTLPSAHQPPVIPATHPALSRDHQIPVIAANYPDLPSAYQPGILSVSHSAQPPAHQPPMISTKYPELFPAHQSPMFPDTRVAGTQTTTHLPGIPPNHAPLVTTLGAQLPPQAPDALVLRTQATQLPIIPTAQPSLTTTSRSPVSPAHQISVPAATQPAALPTLLPSQSPTNQTSPISPTHPHSKAPQIPREDGPSPKLALWLPSPAPTAAPTALGEAGLAEHSQRDDR

SEQ ID NO: 2005 - protein, 116 aa, Homo sapiens
CSPDNGGCEHECVEEVDGHVSCRCTEGFRLAADGRSCEDPCAQAPCEQQCEPGGPQGYSCHCRLGFRPAEDDPHRCVDTDECQIAGVCQQMCVNYVGGFECYCSEGHELEADGISC

SEQ ID NO: 2006 - protein, 55 aa, Homo sapiens
PAVYTTPFHLVSTEFEWLPFGSVAAVQCQAGRGASLLCVKQPEGGVGWSRAGPLC

SEQ ID NO: 2007 - protein, 665 aa, Homo sapiens
WAAEPRAACGPSSCYALFPRRRTFLEAWRACRELGGDLATPRTPEEAQRVDSLVGAGPASRLLWIGLQRQARQCQLQRPLRGFTWTTGDQDTAFTNWAQPASGGPCPAQRCVALEASGEHRWLEGSCTLAVDGYLCQFGFEGACPALQDEAGQAGPAVYTTPFHLVSTEFEWLPFGSVAAVQCQAGRGASLLCVKQPEGGVGWSRAGPLCLGTGCSPDNGGCEHECVEEVDGHVSCRCTEGFRLAADGRSCEDPCAQAPCEQQCEPGGPQGYSCHCRLGFRPAEDDPHRCVDTDECQIAGVCQQMCVNYVGGFECYCSEGHELEADGISCSPAGAMGAQASQDLGDELLDDGEDEEDEDEAWKAFNGGWTEMPGILWMEPTQPPDFALAYRPSFPEDREPQIPYPEPTWPPPLSAPRVPYHSSVLSVTRPVVVSATHPTLPSAHQPPVIPATHPALSRDHQIPVIAANYPDLPSAYQPGILSVSHSAQPPAHQPPMISTKYPELFPAHQSPMFPDTRVAGTQTTTHLPGIPPNHAPLVTTLGAQLPPQAPDALVLRTQATQLPIIPTAQPSLTTTSRSPVSPAHQISVPAATQPAALPTLLPSQSPTNQTSPISPTHPHSKAPQIPREDGPSPKLALWLPSPAPTAAPTALGEAGLAEHSQRDDR

SEQ ID NO: 2008 - protein, 447 aa, Homo sapiens
SDVLHFTSTTTSKNRIIITWHRYRPPDYRDLISFTVYYKEAPFKNVTEYDGQDACGSNSWNMVDVDLPPNKDVEPGILLHGLKPWTQYAVYVKAVTLTMVENDHIRGAKSEILYIRTNASVPSIPLDVLSASNSSSQLIVKWNPPSLPNGNLSYYIVRWQRQPQDGYLYRHNYCSKDKIPIRKYADGTIDIEEVTENPKTEVCGGEKGPCCACPKTEAEKQAEKEEAEYRKVFENFLHNSIFVPRPERKRRDVMQVANTTMSSRSRNTTAADTYNITDPEELETEYPFFESRVDNKERTVISNLRPFTLYRIDIHSCNHEAEKLGCSASNFVFARTMPAEGADDIPGPVTWEPRPENSIFLKWPEPENPNGLILMYEIKYGSQVEDQRECVSRQEYRKYGGAKLNRLNPGNYTARIQATSLSGNGSWTDPVFFYVQAKTGYENFIHL

SEQ ID NO: 2009 - protein, 160 aa, Homo sapiens
KVCEEEKKTKTIDSVTSAQMLQGCTIFKGNLLINIRRGNNIASELENFMGLIEVVTGYVKIRHSHALVSLSFLKNLRLILGEEQLEGNYSFYVLDNQNLQQLWDWDHRNLTIKAGKMYFAFNPKLCVSEIYRMEEVTGTKGRQSKGDINTRNNGERASCE

SEQ ID NO: 2010 - protein, 906 aa, Homo sapiens
EICGPGIDIRNDYQQLKRLENCTVIEGYLHILLISKAEDYRSYRFPKLTVITEYLLLFRVAGLESLGDLFPNLTVIRGWKLFYNYALVIFEMTNLKDIGLYNLRNITRGAIRIEKNADLCYLSTVDWSLILDAVSNNYIVGNKPPKECGDLCPGTMEEKPMCEKTTINNEYNYRCWTTNRCQKMCPSTCGKRACTENNECCHPECLGSCSAPDNDTACVACRHYYYAGVCVPACPPNTYRFEGWRCVDRDFCANILSAESSDSEGFVIHDGECMQECPSGFIRNGSQSMYCIPCEGPCPKVCEEEKKTKTIDSVTSAQMLQGCTIFKGNLLINIRRGNNIASELENFMGLIEVVTGYVKIRHSHALVSLSFLKNLRLILGEEQLEGNYSFYVLDNQNLQQLWDWDHRNLTIKAGKMYFAFNPKLCVSEIYRMEEVTGTKGRQSKGDINTRNNGERASCESDVLHFTSTTTSKNRIIITWHRYRPPDYRDLISFTVYYKEAPFKNVTEYDGQDACGSNSWNMVDVDLPPNKDVEPGILLHGLKPWTQYAVYVKAVTLTMVENDHIRGAKSEILYIRTNASVPSIPLDVLSASNSSSQLIVKWNPPSLPNGNLSYYIVRWQRQPQDGYLYRHNYCSKDKIPIRKYADGTIDIEEVTENPKTEVCGGEKGPCCACPKTEAEKQAEKEEAEYRKVFENFLHNSIFVPRPERKRRDVMQVANTTMSSRSRNTTAADTYNITDPEELETEYPFFESRVDNKERTVISNLRPFTLYRIDIHSCNHEAEKLGCSASNFVFARTMPAEGADDIPGPVTWEPRPENSIFLKWPEPENPNGLILMYEIKYGSQVEDQRECVSRQEYRKYGGAKLNRLNPGNYTARIQATSLSGNGSWTDPVFFYVQAKTGYENFIHL

SEQ ID NO: 2011 - DNA, 4104 bp, Artificial Sequence; identical to SEQ ID NO: 1988
  IGF-1R-1

SEQ ID NO: 2012 - protein, 1367 aa, Artificial Sequence; identical to SEQ ID NO: 1989
  IGF-1R-2

SEQ ID NO: 2013 - DNA, 4104 bp, Artificial Sequence
  IGF-1R-3
atgaagtctggctctggagaagggtccccgacctcgctgtgggggctcctgtttctctccgccgcgctctcgctctggccgacgagtggagaaatctgtgggccgggcatcgacatccgcaacgactatcagcagctgaagcgcctggagaactgcacggtgatcgagggctacctccacatcctgctcatctccaaggccgaggactaccgcagctaccgcttccccaagctcacggtcatcaccgagtacttgctgttgttccgagtggctggcctagagagcctcggagacctgttccccaacctcacggtaatccgcggctggaaactcttctacaactacgcactagtcatctttgagatgaccaatctcaaggatattgggctttacaacctgaggaacattactcggggggccatcaggattgagaaaaatgctgacctctgttacctctccactgtggactggtccctgatcctggatgcagtgtccaataactacattgtggggaataagcccccaaaggaatgcggggacctgtgtccggggaccatggaggagaagccgatgtgcgagaagaccaccatcaacaatgagtacaactaccgctgctggaccacaaaccgctgccagaaaatgtgcccgagtgcctgtgggaagagggcatgcaccgagaacaacgagtgctgccaccccgagtgcctgggcagctgcagcgcgcctgacaacgacacggcctgtgtagcttgccgccactactactacgccggtgtctgcgtgcctgcctgcccgcccaacacctacaggtttgagggctggcgctgtgtggaccgtgacttctgcgccaacatcctcagcgccgagagcagcgactccgagggtttcgtgatccacgacggcgagtgcatgcaggagtgcccctcaggcttcatccgcaacggcagccagagcatgtactgcatcccttgtgaaggtccttgccccaaggtctgtgaggaagaaaagaaaacaaagaccattgattctgttacttctgctcagatgctccaaggatgcaccatcttcaagggcaatttgctcattaacatccgacgggggaataacattgcttcagaactggagaacttcatggggctcatcgaggtggtgacgggctacgtgaagatccgccattcccatgccttggtctccttgtccttcctaaaaaaccttcgcctcatcttaggagaggagcagctagaagggaattactccttctacgtcctcgacaaccagaacttgcagcaactatgggactgggaccaccgcaacctgaccatcaaagcagggaaaatgtactttgctttcaatcccaaattgtgtgtttcggaaatttaccgcatggaggaagtgacggggactaaagggcgccaaagcaaaggggacataaacaccaggaacaacggggaaagagcctcctgtgaaagtgacgtcctgcatttcacctccaccaccacgtggaagaatcgcatcatcataacctggcaccggtaccggccccctgactacagggatctcatcagcttcaccgtttactacaaggaagcaccttttaagaatgtcacggagtatgatgggcaggatgcctgcggctccaacagctggaacatggtggatgtggacctcccgcccaacaaggacgtggagcccggcatcttactgcatgggctgaagccctggactcagtacgccgtttacgtcaaggctgtgaccctcaccatggtggagaacgaccatatccgtggggccaagagtgagatcttgtacattcgcaccaatgcttcagttccttccattcccttggacgttctttcagcatcgaactcctcttctcagttaatcgtgaagtggaaccctccctctctgcccaacggcaacctgagttactacattgtgcgctggcagcggcagcctcaggacggctacctttaccggcacaattactgctccaaagacaaaatccccatcaggaagtatgccgacggcaccattgacattgaggaggtcacagagaacccgaagactgaggtgtgtggtggagagaaagggccttgctgcgcctgccccaaaactgaagctgagaagcaggccgagaaggaggaggctgagtaccgcaaagtctttgagaatttcctgcacaactccatctttgtgcccagacctgaaaggaagcggagagatgtcatgcaagtggccaacaccaccatgtccagccgaagcaggaacaccacggtggcagacacctacaacatcacagatctggaagagctagagacagagtaccctttctttgagagcagagtggataataaggagagaactgtcatttctaaccttcggcctttcacattgtaccgcattgatatccacagctgcaaccacgaggctgagaaactgggctgcagcgcctccaactttgtctttgcaaggactatgcctgcagaaggagcagatgacattcctgggccagtgacctgggagccaaggcctgaaaactccatctttttaaagtggccagaacctgagaatcccaatggattgattctaatgtatgaaataaaatacggatcacaagttgaggatcagcgagaatgtgtgtccagacaggaatacaggaagtatggaggggccaagctaaaccggctaaaccccgggaactacacagcccggattcaggctacatctctctctgggaatgggtcgtggacagatcctgtgttcttctatgtccaggccaaaacaggatatgaaaacttcatccatctgatcatcgctctgcccgtcgctgtcctgttgatcgtgggagggttggtgatcatgctgtacgtcttccatagaaagagaaataacagcaggctggggaatggagtgctgtacgcgtctgtgaacccggagtacttcagcgctgcggatgtgtacgttcctgatgagtgggaggtggctcgggagaagatcaccatgagccgggaacttgggcaggggtcgtttgggatggtctatgaaggagttgccaagggtgtggtgaaagacgaacctgaaaccagagtggccattaaaacagtgaacgaggccgcgagcatgcgtgaaaggatcgagtttctcaacgaggcttctgtgatgaaggagttcaattgtcaccatgtggtgcggttgctgggtgtggtgtcccagggccagccaacgctggtcatcatggaactgatgacgcggggcgatctcaaaagttatctccggtctctgaggccagaaatggagaataatccagtcctagcacctccaagcctaagcaagatgattcagatggctggagagattgcagacggcatggcatacctcaacgccaacaagttcgtccacagagaccttgctgcccggaattgcatggtagccgaggatttcacagtcaaaattggagattttgggatgacgcgagatatctatgagacagactattaccggaaaggagggaaagggctgttgcccgtgcgctggatgtctcccgagtccctcaaggatggagtcttcaccacttactcggacgtctggtccttcggggttgtcctctgggagatcgccacactggccgagcagccctaccagggcttgtccaacgagcaagtccttcgcttcgtcatggagggcggccttctggacaagccagacaactgccccgacatgctgtttgaattgatgcgcatgtgctggcagtacaaccccaagatgaggccttccttcctggagatcatcagcagcatcaaagacgagatggagcctggcttccgggaggtctccttctactacagtgaggagaacaagctgcccgagccggaggagctggacctggagccagagaacatggagagcgtccccctggacccctcggcctcctcgtcctccctgccactgcccgacagacactcaggacacaaggccgagaacggccccggccctggagtgctggtgctccgcgccagcttcgatgagagacagccttacgcacacatgaacggtggccgcaagaacgagcgggccttgccgctgccccagtcttcgacctgctga

SEQ ID NO: 2014 - protein, 1367 aa, Artificial Sequence; identical to SEQ ID NO: 1999
  IGF-1R-4

SEQ ID NO: 2015 - protein, 130 aa, Artificial Sequence
  IGF1R2-H
EVQLVQSGAEVKKPGSSVKVSCKASGGTFSSYAISWVRQAPGQGLEWMGGIIPIFGTANYAQKFQGRVTITADKSTSTAYMELSSLRSEDTAVYYCARAPLRFLEWSTQDHYYYYYMDVWGKGTTVTVSS

SEQ ID NO: 2016 - protein, 5 aa, Artificial Sequence
  IGF1R2-HCDR1
SYAIS

SEQ ID NO: 2017 - protein, 17 aa, Artificial Sequence
  IGF1R2-HCDR2
GIIPIFGTANYAQKFQG

SEQ ID NO: 2018 - protein, 21 aa, Artificial Sequence
  IGF1R2-HCDR3
APLRFLEWSTQDHYYYYYMDV

SEQ ID NO: 2019 - DNA, 390 bp, Artificial Sequence
  IGF1R2-H
gaggtgcaactagtccagagcggagcggaggtgaagaaacctggatccagcgtgaaagtgagctgtaaggctagcggaggcacattctcctcgtatgccattagctgggttagacaagcacctggacaaggactggagtggatgggagggataatcccaatcttcggaactgccaactacgcacagaagttccaaggacgggtcaccatcactgcggataagtccacctcgactgcctacatggagctcagtagcttacggagcgaagacacagccgtatactattgcgcacgagcacccctaagattcctggagtggagcacgcaggatcactattactattactacatggacgtgtggggaaagggaacgactgtcaccgtttcaagc

SEQ ID NO: 2020 - protein, 108 aa, Artificial Sequence
  IGF1R2-L
SSELTQDPAVSVALGQTVRITCQGDSLRSYYATWYQQKPGQAPILVIYGENKRPSGIPDRFSGSSSGNTASLTITGAQAEDEADYYCKSRDGSGQHLVFGGGTKLTVL

SEQ ID NO: 2021 - protein, 11 aa, Artificial Sequence
  IGF1R2-LCDR1
QGDSLRSYYAT

SEQ ID NO: 2022 - protein, 7 aa, Artificial Sequence
  IGF1R2-LCDR2
GENKRPS

SEQ ID NO: 2023 - protein, 11 aa, Artificial Sequence
  IGF1R2-LCDR3
KSRDGSGQHLV

SEQ ID NO: 2024 - DNA, 324 bp, Artificial Sequence
  IGF1R2-L
agctcggaattgacccaggatcctgctgtatccgtcgctctcggacaaaccgtgcgcataacatgtcaaggggactccctgaggagctactacgccacatggtaccagcaaaaacccggacaagctccaatcctggtgatttatggcgaaaacaagcgtccctcagggatcccagacaggtttagcggaagttcgagcggcaatactgccagtctgacgattaccggagctcaagctgaggatgaagccgactactattgcaaatcacgcgacggaagcggccagcacctggtgtttggtggcgggacaaagctgaccgttttg

SEQ ID NO: 2025 - protein, 253 aa, Artificial Sequence
  IGF1R2-HL
EVQLVQSGAEVKKPGSSVKVSCKASGGTFSSYAISWVRQAPGQGLEWMGGIIPIFGTANYAQKFQGRVTITADKSTSTAYMELSSLRSEDTAVYYCARAPLRFLEWSTQDHYYYYYMDVWGKGTTVTVSSGGGGSGGGGSGGGGSSSELTQDPAVSVALGQTVRITCQGDSLRSYYATWYQQKPGQAPILVIYGENKRPSGIPDRFSGSSSGNTASLTITGAQAEDEADYYCKSRDGSGQHLVFGGGTKLTVL

SEQ ID NO: 2026 - DNA, 759 bp, Artificial Sequence
  IGF1R2-HL
gaggtgcaactagtccagagcggagcggaggtgaagaaacctggatccagcgtgaaagtgagctgtaaggctagcggaggcacattctcctcgtatgccattagctgggttagacaagcacctggacaaggactggagtggatgggagggataatcccaatcttcggaactgccaactacgcacagaagttccaaggacgggtcaccatcactgcggataagtccacctcgactgcctacatggagctcagtagcttacggagcgaagacacagccgtatactattgcgcacgagcacccctaagattcctggagtggagcacgcaggatcactattactattactacatggacgtgtggggaaagggaacgactgtcaccgtttcaagcggtggaggtggaagtggtggaggagggagcggtgggggaggatcaagctcggaattgacccaggatcctgctgtatccgtcgctctcggacaaaccgtgcgcataacatgtcaaggggactccctgaggagctactacgccacatggtaccagcaaaaacccggacaagctccaatcctggtgatttatggcgaaaacaagcgtccctcagggatcccagacaggtttagcggaagttcgagcggcaatactgccagtctgacgattaccggagctcaagctgaggatgaagccgactactattgcaaatcacgcgacggaagcggccagcacctggtgtttggtggcgggacaaagctgaccgttttg

SEQ ID NO: 2027 - protein, 508 aa, Artificial Sequence
  IGF1R2HLxI2CHL
EVQLVQSGAEVKKPGSSVKVSCKASGGTFSSYAISWVRQAPGQGLEWMGGIIPIFGTANYAQKFQGRVTITADKSTSTAYMELSSLRSEDTAVYYCARAPLRFLEWSTQDHYYYYYMDVWGKGTTVTVSSGGGGSGGGGSGGGGSSSELTQDPAVSVALGQTVRITCQGDSLRSYYATWYQQKPGQAPILVIYGENKRPSGIPDRFSGSSSGNTASLTITGAQAEDEADYYCKSRDGSGQHLVFGGGTKLTVLSGGGGSEVQLVESGGGLVQPGGSLKLSCAASGFTFNKYAMNWVRQAPGKGLEWVARIRSKYNNYATYYADSVKDRFTISRDDSKNTAYLQMNNLKTEDTAVYYCVRHGNFGNSYISYWAYWGQGTLVTVSSGGGGSGGGGSGGGGSQTVVTQEPSLTVSPGGTVTLTCGSSTGAVTSGNYPNWVQQKPGQAPRGLIGGTKFLAPGTPARFSGSLLGGKAALTLSGVQPEDEAEYYCVLWYSNRWVFGGGTKLTVL

SEQ ID NO: 2028 - DNA, 1524 bp, Artificial Sequence
  IGF1R2HLxI2CHL
gaggtgcaactagtccagagcggagcggaggtgaagaaacctggatccagcgtgaaagtgagctgtaaggctagcggaggcacattctcctcgtatgccattagctgggttagacaagcacctggacaaggactggagtggatgggagggataatcccaatcttcggaactgccaactacgcacagaagttccaaggacgggtcaccatcactgcggataagtccacctcgactgcctacatggagctcagtagcttacggagcgaagacacagccgtatactattgcgcacgagcacccctaagattcctggagtggagcacgcaggatcactattactattactacatggacgtgtggggaaagggaacgactgtcaccgtttcaagcggtggaggtggaagtggtggaggagggagcggtgggggaggatcaagctcggaattgacccaggatcctgctgtatccgtcgctctcggacaaaccgtgcgcataacatgtcaaggggactccctgaggagctactacgccacatggtaccagcaaaaacccggacaagctccaatcctggtgatttatggcgaaaacaagcgtccctcagggatcccagacaggtttagcggaagttcgagcggcaatactgccagtctgacgattaccggagctcaagctgaggatgaagccgactactattgcaaatcacgcgacggaagcggccagcacctggtgtttggtggcgggacaaagctgaccgttttgtccggaggtggtggatccgaggtgcagctggtcgagtctggaggaggattggtgcagcctggagggtcattgaaactctcatgtgcagcctctggattcaccttcaataagtacgccatgaactgggtccgccaggctccaggaaagggtttggaatgggttgctcgcataagaagtaaatataataattatgcaacatattatgccgattcagtgaaagacaggttcaccatctccagagatgattcaaaaaacactgcctatctacaaatgaacaacttgaagactgaggacactgccgtgtactactgtgtgagacatgggaacttcggtaatagctacatatcctactgggcttactggggccaagggactctggtcaccgtctcctcaggtggtggtggttctggcggcggcggctccggtggtggtggttctcagactgttgtgactcaggaaccttcactcaccgtatcacctggtggaacagtcacactcacttgtggctcctcgactggggctgttacatctggcaactacccaaactgggtccaacaaaaaccaggtcaggcaccccgtggtctaataggtgggactaagttcctcgcccccggtactcctgccagattctcaggctccctgcttggaggcaaggctgccctcaccctctcaggggtacagccagaggatgaggcagaatattactgtgttctatggtacagcaaccgctgggtgttcggtggaggaaccaaactgactgtccta

SEQ ID NO: 2029 - protein, 118 aa, Artificial Sequence
  IGF1R7-H
QVELVESGGGVVQPGRSQRLSCAASGFTFSSYGMHWVRQAPGKGLEWVAIIWFDGSSTYYADSVRGRFTISRDNSKNTLYLQMNSLRAEDTAVYFCARELGRRYFDLWGRGTLVSVSS

SEQ ID NO: 2030 - protein, 5 aa, Artificial Sequence
  IGF1R7-HCDR1
SYGMH

SEQ ID NO: 2031 - protein, 17 aa, Artificial Sequence
  IGF1R7-HCDR2
IIWFDGSSTYYADSVRG

SEQ ID NO: 2032 - protein, 9 aa, Artificial Sequence
  IGF1R7-HCDR3
ELGRRYFDL

SEQ ID NO: 2033 - DNA, 354 bp, Artificial Sequence
  IGF1R7-H
caggtcgaattggtggaaagcgggggaggcgtcgttcagcctggtaggagccagaggcttagctgtgctgcctccggtttcaccttctctagctacggaatgcactgggtgagacaggcacccggaaaaggactggaatgggtggccatcatctggttcgacggctcttccacctactatgccgatagcgtgagaggacgcttcaccatctcccgtgacaactccaagaacaccctgtacctccagatgaatagcctgcgagctgaggacactgccgtgtacttttgtgcacgggagctgggacgtaggtactttgatctgtggggaagaggcacactggttagcgttagctcc

SEQ ID NO: 2034 - protein, 108 aa, Artificial Sequence
  IGF1R7-L
EIVLTQSPATLSLSPGERATLSCRASQSVSSYLAWYQQKPGQAPRLLIYDASKRAYGIPARFSGSGSGTDFTLTISSLEPEDFAVYYCQQRSKWPPWTFGQGTKVESK

SEQ ID NO: 2035 - protein, 11 aa, Artificial Sequence
  IGF1R7-LCDR1
RASQSVSSYLA

SEQ ID NO: 2036 - protein, 7 aa, Artificial Sequence
  IGF1R7-LCDR2
DASKRAY

SEQ ID NO: 2037 - protein, 8 aa, Artificial Sequence
  IGF1R7-LCDR3
QQRSKWPP

SEQ ID NO: 2038 - DNA, 324 bp, Artificial Sequence
  IGF1R7-L
gaaatcgtgctcacccagagccctgccacattgagcctttcacctggcgagcgagctacattgtcatgccgagctagccagagcgtgagctcttacctggcatggtatcagcagaaacctgggcaggctccacgactgctcatctatgacgcctccaagcgagcctatgggattcctgcaaggtttagcggaagcggaagcggaaccgatttcaccctgactatctcctcactcgagcctgaggactttgccgtgtattactgccagcagcggagcaagtggcctccatggacattcggccagggtaccaaagtggagagcaag

SEQ ID NO: 2039 - protein, 241 aa, Artificial Sequence
  IGF1R7-HL
QVELVESGGGVVQPGRSQRLSCAASGFTFSSYGMHWVRQAPGKGLEWVAIIWFDGSSTYYADSVRGRFTISRDNSKNTLYLQMNSLRAEDTAVYFCARELGRRYFDLWGRGTLVSVSSGGGGSGGGGSGGGGSEIVLTQSPATLSLSPGERATLSCRASQSVSSYLAWYQQKPGQAPRLLIYDASKRAYGIPARFSGSGSGTDFTLTISSLEPEDFAVYYCQQRSKWPPWTFGQGTKVESK

SEQ ID NO: 2040 - DNA, 723 bp, Artificial Sequence
  IGF1R7-HL
caggtcgaattggtggaaagcgggggaggcgtcgttcagcctggtaggagccagaggcttagctgtgctgcctccggtttcaccttctctagctacggaatgcactgggtgagacaggcacccggaaaaggactggaatgggtggccatcatctggttcgacggctcttccacctactatgccgatagcgtgagaggacgcttcaccatctcccgtgacaactccaagaacaccctgtacctccagatgaatagcctgcgagctgaggacactgccgtgtacttttgtgcacgggagctgggacgtaggtactttgatctgtggggaagaggcacactggttagcgttagctccggcggagggggaagcggaggcggaggtagcgggggaggtggaagcgaaatcgtgctcacccagagccctgccacattgagcctttcacctggcgagcgagctacattgtcatgccgagctagccagagcgtgagctcttacctggcatggtatcagcagaaacctgggcaggctccacgactgctcatctatgacgcctccaagcgagcctatgggattcctgcaaggtttagcggaagcggaagcggaaccgatttcaccctgactatctcctcactcgagcctgaggactttgccgtgtattactgccagcagcggagcaagtggcctccatggacattcggccagggtaccaaagtggagagcaag

SEQ ID NO: 2041 - protein, 496 aa, Artificial Sequence
  IGF1R7HLxI2CHL
QVELVESGGGVVQPGRSQRLSCAASGFTFSSYGMHWVRQAPGKGLEWVAIIWFDGSSTYYADSVRGRFTISRDNSKNTLYLQMNSLRAEDTAVYFCARELGRRYFDLWGRGTLVSVSSGGGGSGGGGSGGGGSEIVLTQSPATLSLSPGERATLSCRASQSVSSYLAWYQQKPGQAPRLLIYDASKRAYGIPARFSGSGSGTDFTLTISSLEPEDFAVYYCQQRSKWPPWTFGQGTKVESKSGGGGSEVQLVESGGGLVQPGGSLKLSCAASGFTFNKYAMNWVRQAPGKGLEWVARIRSKYNNYATYYADSVKDRFTISRDDSKNTAYLQMNNLKTEDTAVYYCVRHGNFGNSYISYWAYWGQGTLVTVSSGGGGSGGGGSGGGGSQTVVTQEPSLTVSPGGTVTLTCGSSTGAVTSGNYPNWVQQKPGQAPRGLIGGTKFLAPGTPARFSGSLLGGKAALTLSGVQPEDEAEYYCVLWYSNRWVFGGGTKLTVL

SEQ ID NO: 2042 - DNA, 1488 bp, Artificial Sequence
  IGF1R7HLxI2CHL
caggtcgaattggtggaaagcgggggaggcgtcgttcagcctggtaggagccagaggcttagctgtgctgcctccggtttcaccttctctagctacggaatgcactgggtgagacaggcacccggaaaaggactggaatgggtggccatcatctggttcgacggctcttccacctactatgccgatagcgtgagaggacgcttcaccatctcccgtgacaactccaagaacaccctgtacctccagatgaatagcctgcgagctgaggacactgccgtgtacttttgtgcacgggagctgggacgtaggtactttgatctgtggggaagaggcacactggttagcgttagctccggcggagggggaagcggaggcggaggtagcgggggaggtggaagcgaaatcgtgctcacccagagccctgccacattgagcctttcacctggcgagcgagctacattgtcatgccgagctagccagagcgtgagctcttacctggcatggtatcagcagaaacctgggcaggctccacgactgctcatctatgacgcctccaagcgagcctatgggattcctgcaaggtttagcggaagcggaagcggaaccgatttcaccctgactatctcctcactcgagcctgaggactttgccgtgtattactgccagcagcggagcaagtggcctccatggacattcggccagggtaccaaagtggagagcaagtccggaggtggtggatccgaggtgcagctggtcgagtctggaggaggattggtgcagcctggagggtcattgaaactctcatgtgcagcctctggattcaccttcaataagtacgccatgaactgggtccgccaggctccaggaaagggtttggaatgggttgctcgcataagaagtaaatataataattatgcaacatattatgccgattcagtgaaagacaggttcaccatctccagagatgattcaaaaaacactgcctatctacaaatgaacaacttgaagactgaggacactgccgtgtactactgtgtgagacatgggaacttcggtaatagctacatatcctactgggcttactggggccaagggactctggtcaccgtctcctcaggtggtggtggttctggcggcggcggctccggtggtggtggttctcagactgttgtgactcaggaaccttcactcaccgtatcacctggtggaacagtcacactcacttgtggctcctcgactggggctgttacatctggcaactacccaaactgggtccaacaaaaaccaggtcaggcaccccgtggtctaataggtgggactaagttcctcgcccccggtactcctgccagattctcaggctccctgcttggaggcaaggctgccctcaccctctcaggggtacagccagaggatgaggcagaatattactgtgttctatggtacagcaaccgctgggtgttcggtggaggaaccaaactgactgtccta

SEQ ID NO: 2043 - protein, 120 aa, Artificial Sequence
  IGF1R9-H
EVQLLESGGGLVQPGGSLRLSCAASGFTFSIYRMQWVRQAPGKGLEWVSGISPSGGTTWYADSVKGRFTISRDNSKNTLYLQMNSLRAEDTAVYYCARWSGGSGYAFDIWGQGTMVTVSS

SEQ ID NO: 2044 - protein, 5 aa, Artificial Sequence
  IGF1R9-HCDR1
IYRMQ

SEQ ID NO: 2045 - protein, 17 aa, Artificial Sequence
  IGF1R9-HCDR2
GISPSGGTTWYADSVKG

SEQ ID NO: 2046 - protein, 11 aa, Artificial Sequence
  IGF1R9-HCDR3
WSGGSGYAFDI

SEQ ID NO: 2047 - DNA, 360 bp, Artificial Sequence
  IGF1R9-H
gaagttcagctgctcgagagcggaggtggacttgtgcagcctgggggatcactgagattgtcatgcgcagctagcggctttaccttctccatctatcgcatgcagtgggttcgacaggcacccggaaagggattggaatgggtctccggcattagccctagcgggggaacaacctggtatgccgatagcgtgaagggcaggttcaccatctctagggacaacagcaaaaatactctgtacctgcagatgaactccctgcgtgccgaggatactgccgtctactactgtgctcgatggtccggtggctccggctatgccttcgatatctggggacagggtacaatggtgactgtgagtagc

SEQ ID NO: 2048 - protein, 107 aa, Artificial Sequence
  IGF1R9-L
DIQMTQSPLSLSASVGDRVTITCQASRDIRNYLNWYQQKPGKAPKLLIYDASSLQTGVPSRFGGSGSGTDFSFTIGSLQPEDIATYYCQQFDSLPHTFGQGTKLEIK

SEQ ID NO: 2049 - protein, 11 aa, Artificial Sequence
  IGF1R9-LCDR1
QASRDIRNYLN

SEQ ID NO: 2050 - protein, 7 aa, Artificial Sequence
  IGF1R9-LCDR2
DASSLQT

SEQ ID NO: 2051 - protein, 9 aa, Artificial Sequence
  IGF1R9-LCDR3
QQFDSLPHT

SEQ ID NO: 2052 - DNA, 321 bp, Artificial Sequence
  IGF1R9-L
gacattcagatgacccagagcccattgtcactgtcagcttccgtgggcgatcgggtgaccattacatgccaggcttcacgcgacatcaggaactacctgaactggtatcagcagaagcctggcaaagcccccaagctccttatctacgacgcaagctcactgcagactggtgttccctcaagattcggtggaagcgggagtggcaccgactttagctttaccatcggctctctgcagcctgaggacatcgccacatattactgccagcagtttgactccctgccacacacatttggccagggcaccaaactggagatcaag

SEQ ID NO: 2053 - protein, 242 aa, Artificial Sequence
  IGF1R9-HL
EVQLLESGGGLVQPGGSLRLSCAASGFTFSIYRMQWVRQAPGKGLEWVSGISPSGGTTWYADSVKGRFTISRDNSKNTLYLQMNSLRAEDTAVYYCARWSGGSGYAFDIWGQGTMVTVSSGGGGSGGGGSGGGGSDIQMTQSPLSLSASVGDRVTITCQASRDIRNYLNWYQQKPGKAPKLLIYDASSLQTGVPSRFGGSGSGTDFSFTIGSLQPEDIATYYCQQFDSLPHTFGQGTKLEIK

SEQ ID NO: 2054 - DNA, 726 bp, Artificial Sequence
  IGF1R9-HL
gaagttcagctgctcgagagcggaggtggacttgtgcagcctgggggatcactgagattgtcatgcgcagctagcggctttaccttctccatctatcgcatgcagtgggttcgacaggcacccggaaagggattggaatgggtctccggcattagccctagcgggggaacaacctggtatgccgatagcgtgaagggcaggttcaccatctctagggacaacagcaaaaatactctgtacctgcagatgaactccctgcgtgccgaggatactgccgtctactactgtgctcgatggtccggtggctccggctatgccttcgatatctggggacagggtacaatggtgactgtgagtagcggagggggaggtagcggaggaggtggaagtggcggaggtggaagcgacattcagatgacccagagcccattgtcactgtcagcttccgtgggcgatcgggtgaccattacatgccaggcttcacgcgacatcaggaactacctgaactggtatcagcagaagcctggcaaagcccccaagctccttatctacgacgcaagctcactgcagactggtgttccctcaagattcggtggaagcgggagtggcaccgactttagctttaccatcggctctctgcagcctgaggacatcgccacatattactgccagcagtttgactccctgccacacacatttggccagggcaccaaactggagatcaag

SEQ ID NO: 2055 - protein, 497 aa, Artificial Sequence
  IGF1R9HLxI2CHL
EVQLLESGGGLVQPGGSLRLSCAASGFTFSIYRMQWVRQAPGKGLEWVSGISPSGGTTWYADSVKGRFTISRDNSKNTLYLQMNSLRAEDTAVYYCARWSGGSGYAFDIWGQGTMVTVSSGGGGSGGGGSGGGGSDIQMTQSPLSLSASVGDRVTITCQASRDIRNYLNWYQQKPGKAPKLLIYDASSLQTGVPSRFGGSGSGTDFSFTIGSLQPEDIATYYCQQFDSLPHTFGQGTKLEIKSGGGGSEVQLVESGGGLVQPGGSLKLSCAASGFTFNKYAMNWVRQAPGKGLEWVARIRSKYNNYATYYADSVKDRFTISRDDSKNTAYLQMNNLKTEDTAVYYCVRHGNFGNSYISYWAYWGQGTLVTVSSGGGGSGGGGSGGGGSQTVVTQEPSLTVSPGGTVTLTCGSSTGAVTSGNYPNWVQQKPGQAPRGLIGGTKFLAPGTPARFSGSLLGGKAALTLSGVQPEDEAEYYCVLWYSNRWVFGGGTKLTVL

SEQ ID NO: 2056 - DNA, 1491 bp, Artificial Sequence
  IGF1R9HLxI2CHL
gaagttcagctgctcgagagcggaggtggacttgtgcagcctgggggatcactgagattgtcatgcgcagctagcggctttaccttctccatctatcgcatgcagtgggttcgacaggcacccggaaagggattggaatgggtctccggcattagccctagcgggggaacaacctggtatgccgatagcgtgaagggcaggttcaccatctctagggacaacagcaaaaatactctgtacctgcagatgaactccctgcgtgccgaggatactgccgtctactactgtgctcgatggtccggtggctccggctatgccttcgatatctggggacagggtacaatggtgactgtgagtagcggagggggaggtagcggaggaggtggaagtggcggaggtggaagcgacattcagatgacccagagcccattgtcactgtcagcttccgtgggcgatcgggtgaccattacatgccaggcttcacgcgacatcaggaactacctgaactggtatcagcagaagcctggcaaagcccccaagctccttatctacgacgcaagctcactgcagactggtgttccctcaagattcggtggaagcgggagtggcaccgactttagctttaccatcggctctctgcagcctgaggacatcgccacatattactgccagcagtttgactccctgccacacacatttggccagggcaccaaactggagatcaagtccggaggtggtggatccgaggtgcagctggtcgagtctggaggaggattggtgcagcctggagggtcattgaaactctcatgtgcagcctctggattcaccttcaataagtacgccatgaactgggtccgccaggctccaggaaagggtttggaatgggttgctcgcataagaagtaaatataataattatgcaacatattatgccgattcagtgaaagacaggttcaccatctccagagatgattcaaaaaacactgcctatctacaaatgaacaacttgaagactgaggacactgccgtgtactactgtgtgagacatgggaacttcggtaatagctacatatcctactgggcttactggggccaagggactctggtcaccgtctcctcaggtggtggtggttctggcggcggcggctccggtggtggtggttctcagactgttgtgactcaggaaccttcactcaccgtatcacctggtggaacagtcacactcacttgtggctcctcgactggggctgttacatctggcaactacccaaactgggtccaacaaaaaccaggtcaggcaccccgtggtctaataggtgggactaagttcctcgcccccggtactcctgccagattctcaggctccctgcttggaggcaaggctgccctcaccctctcaggggtacagccagaggatgaggcagaatattactgtgttctatggtacagcaaccgctgggtgttcggtggaggaaccaaactgactgtccta

SEQ ID NO: 2057 - protein, 121 aa, Artificial Sequence
  IGF1R10-H
EVQLLESGGGLVQPGGSLRLSCAASGFTFSNYHMAWVRQAPGKGLEWVSVISPTGGRTTYADSVKGRFTISRDNSKNTLYLQMNSLRAEDTATYYCARAGYSYGYGYFDYWGQGTLVTVSS

SEQ ID NO: 2058 - protein, 5 aa, Artificial Sequence
  IGF1R10-HCDR1
NYHMA

SEQ ID NO: 2059 - protein, 17 aa, Artificial Sequence
  IGF1R10-HCDR2
VISPTGGRTTYADSVKG

SEQ ID NO: 2060 - protein, 12 aa, Artificial Sequence
  IGF1R10-HCDR2
AGYSYGYGYFDY

SEQ ID NO: 2061 - DNA, 363 bp, Artificial Sequence
  IGF1R10-H
gaagtgcagctcttggagagcggagggggacttgtgcagcctggcggatccttgagactttcttgcgctgcctccggtttcaccttctcaaattaccacatggcctgggtgagacaggctcctggaaaagggctcgaatgggtttccgtgattagcccaaccggagggaggaccacatatgccgatagcgtcaaggggaggtttacaatcagccgtgacaactccaagaacaccctgtacctccagatgaactcactgcgagccgaggatactgcaacctactactgcgctcgagccggatactcatacggctatggctacttcgactactggggacagggaacactggtgaccgttagtagc

SEQ ID NO: 2062 - protein, 108 aa, Artificial Sequence
  IGF1R10-L
DIQMTQFPATLSVSPGERATLSCRASQSVMRNLAWYQQKPGQPPRLLIYGASKRATGIPARFSGSGSGTAFTLTISNLEPEDFAVYYCHQRSTWPLGTFGPGTKLEAK

SEQ ID NO: 2063 - protein, 11 aa, Artificial Sequence
  IGF1R10-LCDR1
RASQSVMRNLA

SEQ ID NO: 2064 - protein, 7 aa, Artificial Sequence
  IGF1R10-LCDR2
GASKRAT

SEQ ID NO: 2065 - protein, 10 aa, Artificial Sequence
  IGF1R10-LCDR3
HQRSTWPLGT

SEQ ID NO: 2066 - DNA, 324 bp, Artificial Sequence
  IGF1R10-L
gatattcagatgacccagttccctgcaaccttgagcgtgtcacctggcgaaagagccacactgtcttgccgagcaagccagagcgtgatgcggaacctggcatggtaccagcagaaacctggccagcctccacgactgctgatctatggagctagcaaaagagccaccggaatccccgctaggtttagcggaagcggaagcggaactgcctttaccctgaccatctccaatctcgagcctgaggactttgccgtctactactgtcaccagcgtagcacttggcctctggggacatttggacctggcacaaagctggaagctaag

SEQ ID NO: 2067 - protein, 244 aa, Artificial Sequence
  IGF1R10-HL
EVQLLESGGGLVQPGGSLRLSCAASGFTFSNYHMAWVRQAPGKGLEWVSVISPTGGRTTYADSVKGRFTISRDNSKNTLYLQMNSLRAEDTATYYCARAGYSYGYGYFDYWGQGTLVTVSSGGGGSGGGGSGGGGSDIQMTQFPATLSVSPGERATLSCRASQSVMRNLAWYQQKPGQPPRLLIYGASKRATGIPARFSGSGSGTAFTLTISNLEPEDFAVYYCHQRSTWPLGTFGPGTKLEAK

SEQ ID NO: 2068 - DNA, 732 bp, Artificial Sequence
  IGF1R10-HL
gaagtgcagctcttggagagcggagggggacttgtgcagcctggcggatccttgagactttcttgcgctgcctccggtttcaccttctcaaattaccacatggcctgggtgagacaggctcctggaaaagggctcgaatgggtttccgtgattagcccaaccggagggaggaccacatatgccgatagcgtcaaggggaggtttacaatcagccgtgacaactccaagaacaccctgtacctccagatgaactcactgcgagccgaggatactgcaacctactactgcgctcgagccggatactcatacggctatggctacttcgactactggggacagggaacactggtgaccgttagtagcggagggggaggttctggcggaggtggaagcgggggcgggggaagcgatattcagatgacccagttccctgcaaccttgagcgtgtcacctggcgaaagagccacactgtcttgccgagcaagccagagcgtgatgcggaacctggcatggtaccagcagaaacctggccagcctccacgactgctgatctatggagctagcaaaagagccaccggaatccccgctaggtttagcggaagcggaagcggaactgcctttaccctgaccatctccaatctcgagcctgaggactttgccgtctactactgtcaccagcgtagcacttggcctctggggacatttggacctggcacaaagctggaagctaag

SEQ ID NO: 2069 - protein, 499 aa, Artificial Sequence
  IGF1R10HLxI2CHL
EVQLLESGGGLVQPGGSLRLSCAASGFTFSNYHMAWVRQAPGKGLEWVSVISPTGGRTTYADSVKGRFTISRDNSKNTLYLQMNSLRAEDTATYYCARAGYSYGYGYFDYWGQGTLVTVSSGGGGSGGGGSGGGGSDIQMTQFPATLSVSPGERATLSCRASQSVMRNLAWYQQKPGQPPRLLIYGASKRATGIPARFSGSGSGTAFTLTISNLEPEDFAVYYCHQRSTWPLGTFGPGTKLEAKSGGGGSEVQLVESGGGLVQPGGSLKLSCAASGFTFNKYAMNWVRQAPGKGLEWVARIRSKYNNYATYYADSVKDRFTISRDDSKNTAYLQMNNLKTEDTAVYYCVRHGNFGNSYISYWAYWGQGTLVTVSSGGGGSGGGGSGGGGSQTVVTQEPSLTVSPGGTVTLTCGSSTGAVTSGNYPNWVQQKPGQAPRGLIGGTKFLAPGTPARFSGSLLGGKAALTLSGVQPEDEAEYYCVLWYSNRWVFGGGTKLTVL

SEQ ID NO: 2070 - DNA, 1497 bp, Artificial Sequence
  IGF1R10HLxI2CHL
gaagtgcagctcttggagagcggagggggacttgtgcagcctggcggatccttgagactttcttgcgctgcctccggtttcaccttctcaaattaccacatggcctgggtgagacaggctcctggaaaagggctcgaatgggtttccgtgattagcccaaccggagggaggaccacatatgccgatagcgtcaaggggaggtttacaatcagccgtgacaactccaagaacaccctgtacctccagatgaactcactgcgagccgaggatactgcaacctactactgcgctcgagccggatactcatacggctatggctacttcgactactggggacagggaacactggtgaccgttagtagcggagggggaggttctggcggaggtggaagcgggggcgggggaagcgatattcagatgacccagttccctgcaaccttgagcgtgtcacctggcgaaagagccacactgtcttgccgagcaagccagagcgtgatgcggaacctggcatggtaccagcagaaacctggccagcctccacgactgctgatctatggagctagcaaaagagccaccggaatccccgctaggtttagcggaagcggaagcggaactgcctttaccctgaccatctccaatctcgagcctgaggactttgccgtctactactgtcaccagcgtagcacttggcctctggggacatttggacctggcacaaagctggaagctaagtccggaggtggtggatccgaggtgcagctggtcgagtctggaggaggattggtgcagcctggagggtcattgaaactctcatgtgcagcctctggattcaccttcaataagtacgccatgaactgggtccgccaggctccaggaaagggtttggaatgggttgctcgcataagaagtaaatataataattatgcaacatattatgccgattcagtgaaagacaggttcaccatctccagagatgattcaaaaaacactgcctatctacaaatgaacaacttgaagactgaggacactgccgtgtactactgtgtgagacatgggaacttcggtaatagctacatatcctactgggcttactggggccaagggactctggtcaccgtctcctcaggtggtggtggttctggcggcggcggctccggtggtggtggttctcagactgttgtgactcaggaaccttcactcaccgtatcacctggtggaacagtcacactcacttgtggctcctcgactggggctgttacatctggcaactacccaaactgggtccaacaaaaaccaggtcaggcaccccgtggtctaataggtgggactaagttcctcgcccccggtactcctgccagattctcaggctccctgcttggaggcaaggctgccctcaccctctcaggggtacagccagaggatgaggcagaatattactgtgttctatggtacagcaaccgctgggtgttcggtggaggaaccaaactgactgtccta

SEQ ID NO: 2071 - protein, 119 aa, Artificial Sequence
  IGF1R11-H
EVQLLESGGGLVQPGGSLRLSCAASGFTFSKYMMSWVRQAPGKGLEWVSYISPSGGLTWYADSVKGRFTISRDNSKNTLYLQMNSLREADTAVYYCARDGARGYGMDVWGQGTTVTVSS

SEQ ID NO: 2072 - protein, 5 aa, Artificial Sequence
  IGF1R11-HCDR1
KYMMS

SEQ ID NO: 2073 - protein, 17 aa, Artificial Sequence
  IGF1R11-HCDR2
YISPSGGLTWYADSVKG

SEQ ID NO: 2074 - protein, 10 aa, Artificial Sequence
  IGF1R11-HCDR3
DGARGYGMDV

SEQ ID NO: 2075 - DNA, 357 bp, Artificial Sequence
  IGF1R11-H
gaggtccagctgttggaaagcggaggcggactcgtgcagcctggcggatctttgcgactttcctgtgctgcctccggtttcaccttctccaagtacatgatgagctgggtgagacaggcaccaggcaaaggactggaatgggtgagctacattagcccatctggcggactgacatggtatgccgatagtgttaaggggaggttcaccatcagtagggacaatagcaagaacaccctgtacctgcagatgaactcactgcgagaggctgatactgccgtgtattactgcgcaagggatggagctagaggctatggaatggacgtgtggggacagggaacaaccgtcaccgtgagcagt

SEQ ID NO: 2076 - protein, 109 aa, Artificial Sequence
  IGF1R11-L
DIQMTQSPATLSLSPGERATLSCRASQSVSSYLAWYQQKPGQAPRLLIYDASNRATGIPARFSGSGSGTDFTLTISSLEPEDFAVYYCQQRSNWPPEVTFGPGTKVDIK

SEQ ID NO: 2077 - protein, 11 aa, Artificial Sequence
  IGF1R11-LCDR1
RASQSVSSYLA

SEQ ID NO: 2078 - protein, 7 aa, Artificial Sequence
  IGF1R11-LCDR2
DASNRAT

SEQ ID NO: 2079 - protein, 11 aa, Artificial Sequence
  IGF1R11-LCDR3
QQRSNWPPEVT

SEQ ID NO: 2080 - protein, 327 aa, Artificial Sequence
  IGF1R11-L
GACATTCAGATGACACAGAGCCCTGCCACACTGAGCCTGTCACCTGGAGAGCGAGCTACATTGAGCTGTCGCGCTAGCCAGAGCGTGTCTTCCTATCTTGCCTGGTACCAGCAGAAACCTGGACAGGCACCAAGACTCCTGATCTACGACGCCTCCAACCGTGCAACTGGCATCCCTGCTCGCTTTTCTGGCTCTGGCTCTGGGACCGACTTTACCTTGACCATCTCCTCACTGGAACCCGAGGATTTTGCCGTGTACTATTGCCAGCAGCGGAGCAATTGGCCTCCCGAAGTCACTTTTGGCCCTGGCACCAAAGTGGATATCAAG

SEQ ID NO: 2081 - protein, 243 aa, Artificial Sequence
  IGF1R11-HL
EVQLLESGGGLVQPGGSLRLSCAASGFTFSKYMMSWVRQAPGKGLEWVSYISPSGGLTWYADSVKGRFTISRDNSKNTLYLQMNSLREADTAVYYCARDGARGYGMDVWGQGTTVTVSSGGGGSGGGGSGGGGSDIQMTQSPATLSLSPGERATLSCRASQSVSSYLAWYQQKPGQAPRLLIYDASNRATGIPARFSGSGSGTDFTLTISSLEPEDFAVYYCQQRSNWPPEVTFGPGTKVDIK

SEQ ID NO: 2082 - DNA, 729 bp, Artificial Sequence
  IGF1R11-HL
gaggtccagctgttggaaagcggaggcggactcgtgcagcctggcggatctttgcgactttcctgtgctgcctccggtttcaccttctccaagtacatgatgagctgggtgagacaggcaccaggcaaaggactggaatgggtgagctacattagcccatctggcggactgacatggtatgccgatagtgttaaggggaggttcaccatcagtagggacaatagcaagaacaccctgtacctgcagatgaactcactgcgagaggctgatactgccgtgtattactgcgcaagggatggagctagaggctatggaatggacgtgtggggacagggaacaaccgtcaccgtgagcagtgggggaggcggaagcggagggggaggtagtggagggggaggctcagacattcagatgacacagagccctgccacactgagcctgtcacctggagagcgagctacattgagctgtcgcgctagccagagcgtgtcttcctatcttgcctggtaccagcagaaacctggacaggcaccaagactcctgatctacgacgcctccaaccgtgcaactggcatccctgctcgcttttctggctctggctctgggaccgactttaccttgaccatctcctcactggaacccgaggattttgccgtgtactattgccagcagcggagcaattggcctcccgaagtcacttttggccctggcaccaaagtggatatcaag

SEQ ID NO: 2083 - protein, 498 aa, Artificial Sequence
  IGF1R11HLxI2CHL
EVQLLESGGGLVQPGGSLRLSCAASGFTFSKYMMSWVRQAPGKGLEWVSYISPSGGLTWYADSVKGRFTISRDNSKNTLYLQMNSLREADTAVYYCARDGARGYGMDVWGQGTTVTVSSGGGGSGGGGSGGGGSDIQMTQSPATLSLSPGERATLSCRASQSVSSYLAWYQQKPGQAPRLLIYDASNRATGIPARFSGSGSGTDFTLTISSLEPEDFAVYYCQQRSNWPPEVTFGPGTKVDIKSGGGGSEVQLVESGGGLVQPGGSLKLSCAASGFTFNKYAMNWVRQAPGKGLEWVARIRSKYNNYATYYADSVKDRFTISRDDSKNTAYLQMNNLKTEDTAVYYCVRHGNFGNSYISYWAYWGQGTLVTVSSGGGGSGGGGSGGGGSQTVVTQEPSLTVSPGGTVTLTCGSSTGAVTSGNYPNWVQQKPGQAPRGLIGGTKFLAPGTPARFSGSLLGGKAALTLSGVQPEDEAEYYCVLWYSNRWVFGGGTKLTVL

SEQ ID NO: 2084 - DNA, 1494 bp, Artificial Sequence
  IGF1R11HLxI2CHL
gaggtccagctgttggaaagcggaggcggactcgtgcagcctggcggatctttgcgactttcctgtgctgcctccggtttcaccttctccaagtacatgatgagctgggtgagacaggcaccaggcaaaggactggaatgggtgagctacattagcccatctggcggactgacatggtatgccgatagtgttaaggggaggttcaccatcagtagggacaatagcaagaacaccctgtacctgcagatgaactcactgcgagaggctgatactgccgtgtattactgcgcaagggatggagctagaggctatggaatggacgtgtggggacagggaacaaccgtcaccgtgagcagtgggggaggcggaagcggagggggaggtagtggagggggaggctcagacattcagatgacacagagccctgccacactgagcctgtcacctggagagcgagctacattgagctgtcgcgctagccagagcgtgtcttcctatcttgcctggtaccagcagaaacctggacaggcaccaagactcctgatctacgacgcctccaaccgtgcaactggcatccctgctcgcttttctggctctggctctgggaccgactttaccttgaccatctcctcactggaacccgaggattttgccgtgtactattgccagcagcggagcaattggcctcccgaagtcacttttggccctggcaccaaagtggatatcaagtccggaggtggtggatccgaggtgcagctggtcgagtctggaggaggattggtgcagcctggagggtcattgaaactctcatgtgcagcctctggattcaccttcaataagtacgccatgaactgggtccgccaggctccaggaaagggtttggaatgggttgctcgcataagaagtaaatataataattatgcaacatattatgccgattcagtgaaagacaggttcaccatctccagagatgattcaaaaaacactgcctatctacaaatgaacaacttgaagactgaggacactgccgtgtactactgtgtgagacatgggaacttcggtaatagctacatatcctactgggcttactggggccaagggactctggtcaccgtctcctcaggtggtggtggttctggcggcggcggctccggtggtggtggttctcagactgttgtgactcaggaaccttcactcaccgtatcacctggtggaacagtcacactcacttgtggctcctcgactggggctgttacatctggcaactacccaaactgggtccaacaaaaaccaggtcaggcaccccgtggtctaataggtgggactaagttcctcgcccccggtactcctgccagattctcaggctccctgcttggaggcaaggctgccctcaccctctcaggggtacagccagaggatgaggcagaatattactgtgttctatggtacagcaaccgctgggtgttcggtggaggaaccaaactgactgtccta

SEQ ID NO: 2085 - protein, 124 aa, Artificial Sequence
  IGF1R12-H
EVQLLESGGGLVQPGGSLRLSCAASGFTFSNYPMYWVRQAPGKGLEWVSRISSSGGRTVYADSVKGRFTISRDNSKNTLYLQMNSLRAEDTAVYYCARDRWSRSAAEYGLGGYWGQGTLVTVSS

SEQ ID NO: 2086 - protein, 5 aa, Artificial Sequence
  IGF1R12-HCDR1
NYPMY

SEQ ID NO: 2087 - protein, 17 aa, Artificial Sequence
  IGF1R12-HCDR2
RISSSGGRTVYADSVKG

SEQ ID NO: 2088 - protein, 15 aa, Artificial Sequence
  IGF1R12-HCDR3
DRWSRSAAEYGLGGY

SEQ ID NO: 2089 - DNA, 372 bp, Artificial Sequence
  IGF1R12-H
gaagtccagctccttgaaagcggtggcggattggtccagcctggaggctctttgagactctcctgtgccgcatcaggcttcaccttttccaactatcctatgtactgggttcgccaggctcctggaaaaggcttggaatgggtgtcacggattagctctagcgggggaaggactgtctatgccgattccgtgaaagggagattcaccatctctcgggacaatagcaagaacaccctgtatctccagatgaactctcttcgtgccgaagacactgccgtgtattactgcgcacgagaccgatggagccgatcagcagctgaatacggcttgggaggctactggggtcagggaactcttgtgactgtctctagc

SEQ ID NO: 2090 - protein, 112 aa, Artificial Sequence
  IGF1R12-L
DIQMTQSPDSLAVSLGERATINCKSSQSVLYSSNNKNYLAWYQQKPGQPPKLLIYLASTRESGVPDRFSGSGSGTDFTLTISSLQAEDVAVYYCQQYYSTWTFGQGTKVEIK

SEQ ID NO: 2091 - protein, 17 aa, Artificial Sequence
  IGF1R12-LCDR1
KSSQSVLYSSNNKNYLA

SEQ ID NO: 2092 - protein, 7 aa, Artificial Sequence
  IGF1R12-LCDR2
LASTRES

SEQ ID NO: 2093 - protein, 8 aa, Artificial Sequence
  IGF1R12-LCDR3
QQYYSTWT

SEQ ID NO: 2094 - DNA, 336 bp, Artificial Sequence
  IGF1R12-L
gatatccagatgactcagagccctgattcactggcagtgtctctcggagaacgtgccacaatcaactgcaagagtagccagtccgtcctttactcctccaacaacaaaaactacctcgcatggtaccagcagaaacctgggcagccacccaaacttctcatctatcttgcttccacacgtgagagtggcgtgcctgaccgttttagcggatccggtagcggaacagatttcactctcacaatctcaagcctgcaggctgaagatgtcgcagtctactattgccagcagtattactcaacctggacattcggacaggggacaaaagtggagatcaaa

SEQ ID NO: 2095 - protein, 251 aa, Artificial Sequence
  IGF1R12-HL
EVQLLESGGGLVQPGGSLRLSCAASGFTFSNYPMYWVRQAPGKGLEWVSRISSSGGRTVYADSVKGRFTISRDNSKNTLYLQMNSLRAEDTAVYYCARDRWSRSAAEYGLGGYWGQGTLVTVSSGGGGSGGGGSGGGGSDIQMTQSPDSLAVSLGERATINCKSSQSVLYSSNNKNYLAWYQQKPGQPPKLLIYLASTRESGVPDRFSGSGSGTDFTLTISSLQAEDVAVYYCQQYYSTWTFGQGTKVEIK

SEQ ID NO: 2096 - DNA, 753 bp, Artificial Sequence
  IGF1R12-HL
gaagtccagctccttgaaagcggtggcggattggtccagcctggaggctctttgagactctcctgtgccgcatcaggcttcaccttttccaactatcctatgtactgggttcgccaggctcctggaaaaggcttggaatgggtgtcacggattagctctagcgggggaaggactgtctatgccgattccgtgaaagggagattcaccatctctcgggacaatagcaagaacaccctgtatctccagatgaactctcttcgtgccgaagacactgccgtgtattactgcgcacgagaccgatggagccgatcagcagctgaatacggcttgggaggctactggggtcagggaactcttgtgactgtctctagcggaggcggtggaagcgggggaggcggatctggtggaggcggaagcgatatccagatgactcagagccctgattcactggcagtgtctctcggagaacgtgccacaatcaactgcaagagtagccagtccgtcctttactcctccaacaacaaaaactacctcgcatggtaccagcagaaacctgggcagccacccaaacttctcatctatcttgcttccacacgtgagagtggcgtgcctgaccgttttagcggatccggtagcggaacagatttcactctcacaatctcaagcctgcaggctgaagatgtcgcagtctactattgccagcagtattactcaacctggacattcggacaggggacaaaagtggagatcaaa

SEQ ID NO: 2097 - protein, 506 aa, Artificial Sequence
  IGF1R12HLxI2CHL
EVQLLESGGGLVQPGGSLRLSCAASGFTFSNYPMYWVRQAPGKGLEWVSRISSSGGRTVYADSVKGRFTISRDNSKNTLYLQMNSLRAEDTAVYYCARDRWSRSAAEYGLGGYWGQGTLVTVSSGGGGSGGGGSGGGGSDIQMTQSPDSLAVSLGERATINCKSSQSVLYSSNNKNYLAWYQQKPGQPPKLLIYLASTRESGVPDRFSGSGSGTDFTLTISSLQAEDVAVYYCQQYYSTWTFGQGTKVEIKSGGGGSEVQLVESGGGLVQPGGSLKLSCAASGFTFNKYAMNWVRQAPGKGLEWVARIRSKYNNYATYYADSVKDRFTISRDDSKNTAYLQMNNLKTEDTAVYYCVRHGNFGNSYISYWAYWGQGTLVTVSSGGGGSGGGGSGGGGSQTVVTQEPSLTVSPGGTVTLTCGSSTGAVTSGNYPNWVQQKPGQAPRGLIGGTKFLAPGTPARFSGSLLGGKAALTLSGVQPEDEAEYYCVLWYSNRWVFGGGTKLTVL

SEQ ID NO: 2098 - DNA, 1518 bp, Artificial Sequence
  IGF1R12HLxI2CHL
gaagtccagctccttgaaagcggtggcggattggtccagcctggaggctctttgagactctcctgtgccgcatcaggcttcaccttttccaactatcctatgtactgggttcgccaggctcctggaaaaggcttggaatgggtgtcacggattagctctagcgggggaaggactgtctatgccgattccgtgaaagggagattcaccatctctcgggacaatagcaagaacaccctgtatctccagatgaactctcttcgtgccgaagacactgccgtgtattactgcgcacgagaccgatggagccgatcagcagctgaatacggcttgggaggctactggggtcagggaactcttgtgactgtctctagcggaggcggtggaagcgggggaggcggatctggtggaggcggaagcgatatccagatgactcagagccctgattcactggcagtgtctctcggagaacgtgccacaatcaactgcaagagtagccagtccgtcctttactcctccaacaacaaaaactacctcgcatggtaccagcagaaacctgggcagccacccaaacttctcatctatcttgcttccacacgtgagagtggcgtgcctgaccgttttagcggatccggtagcggaacagatttcactctcacaatctcaagcctgcaggctgaagatgtcgcagtctactattgccagcagtattactcaacctggacattcggacaggggacaaaagtggagatcaaatccggaggtggtggatccgaggtgcagctggtcgagtctggaggaggattggtgcagcctggagggtcattgaaactctcatgtgcagcctctggattcaccttcaataagtacgccatgaactgggtccgccaggctccaggaaagggtttggaatgggttgctcgcataagaagtaaatataataattatgcaacatattatgccgattcagtgaaagacaggttcaccatctccagagatgattcaaaaaacactgcctatctacaaatgaacaacttgaagactgaggacactgccgtgtactactgtgtgagacatgggaacttcggtaatagctacatatcctactgggcttactggggccaagggactctggtcaccgtctcctcaggtggtggtggttctggcggcggcggctccggtggtggtggttctcagactgttgtgactcaggaaccttcactcaccgtatcacctggtggaacagtcacactcacttgtggctcctcgactggggctgttacatctggcaactacccaaactgggtccaacaaaaaccaggtcaggcaccccgtggtctaataggtgggactaagttcctcgcccccggtactcctgccagattctcaggctccctgcttggaggcaaggctgccctcaccctctcaggggtacagccagaggatgaggcagaatattactgtgttctatggtacagcaaccgctgggtgttcggtggaggaaccaaactgactgtccta

SEQ ID NO: 2099 - protein, 128 aa, Artificial Sequence
  IGF1R13-H
EVQLVQSGAEVKKPGESLTISCKGPGYNFFNYWIGWVRQMPGKGLEWMGIIYPTDSDTRYSPSFQGQVTISVDKSISTAYLQWSSLKASDTAMYYCARSIRYCPGGRCYSGYYGMDVWGQGTMVTVSS

SEQ ID NO: 2100 - protein, 5 aa, Artificial Sequence
  IGF1R13-HCDR1
NYWIG

SEQ ID NO: 2101 - protein, 17 aa, Artificial Sequence
  IGF1R13-HCDR2
IIYPTDSDTRYSPSFQG

SEQ ID NO: 2102 - protein, 19 aa, Artificial Sequence
  IGF1R13-HCDR3
SIRYCPGGRCYSGYYGMDV

SEQ ID NO: 2103 - DNA, 384 bp, Artificial Sequence
  IGF1R13-H
gaagtccagttggtgcagagtggtgccgaagtcaaaaagcctggcgagagcctgaccatctcatgtaagggtcctggctacaacttcttcaactactggatcggatgggtgcgacagatgcctggaaaagggctcgaatggatgggcattatctatcccaccgactccgacacacggtattccccatcatttcagggacaggtcaccatctccgttgacaagagcatctccaccgcttatctccagtggagttccctgaaagcctccgacaccgcaatgtattactgcgcacgtagtatccgttactgcccaggaggcagatgctatagcggatattacggcatggacgtttggggacagggaacaatggtgactgtgagctca

SEQ ID NO: 2104 - protein, 108 aa, Artificial Sequence
  IGF1R13-L
SSELTQDPAVSVALGQTVRITCQGDSLRSYYASWYQQKPGQAPVLVIYGKNNRPSGIPDRFSGSSSGNTASLTITGAQAEDEADYYCNSRDSSGNHVVFGGGTKLTVL

SEQ ID NO: 2105 - protein, 11 aa, Artificial Sequence
  IGF1R13-LCDR1
QGDSLRSYYAS

SEQ ID NO: 2106 - protein, 7 aa, Artificial Sequence
  IGF1R13-LCDR2
GKNNRPS

SEQ ID NO: 2107 - protein, 11 aa, Artificial Sequence
  IGF1R13-LCDR3
NSRDSSGNHVV

SEQ ID NO: 2108 - DNA, 324 bp, Artificial Sequence
  IGF1R13-L
tcaagcgaactgactcaggatccagctgtttctgtcgccttgggacagactgtgcgcattacatgtcagggtgatagcttgcgtagctactacgcttcatggtaccagcagaagcctggacaggcacctgtcctggtgatctacggcaagaacaataggccaagcggtattcccgatcggttttctggatcctcatccggcaatactgcctctctgacaatcaccggtgctcaggctgaagatgaggctgactactactgcaactcccgagattctagcggaaatcacgtggtcttcggaggtgggacaaaacttaccgtgctc

SEQ ID NO: 2109 - protein, 251 aa, Artificial Sequence
  IGF1R13-HL
EVQLVQSGAEVKKPGESLTISCKGPGYNFFNYWIGWVRQMPGKGLEWMGIIYPTDSDTRYSPSFQGQVTISVDKSISTAYLQWSSLKASDTAMYYCARSIRYCPGGRCYSGYYGMDVWGQGTMVTVSSGGGGSGGGGSGGGGSSSELTQDPAVSVALGQTVRITCQGDSLRSYYASWYQQKPGQAPVLVIYGKNNRPSGIPDRFSGSSSGNTASLTITGAQAEDEADYYCNSRDSSGNHVVFGGGTKLTVL

SEQ ID NO: 2110 - DNA, 753 bp, Artificial Sequence
  IGF1R13-HL
gaagtccagttggtgcagagtggtgccgaagtcaaaaagcctggcgagagcctgaccatctcatgtaagggtcctggctacaacttcttcaactactggatcggatgggtgcgacagatgcctggaaaagggctcgaatggatgggcattatctatcccaccgactccgacacacggtattccccatcatttcagggacaggtcaccatctccgttgacaagagcatctccaccgcttatctccagtggagttccctgaaagcctccgacaccgcaatgtattactgcgcacgtagtatccgttactgcccaggaggcagatgctatagcggatattacggcatggacgtttggggacagggaacaatggtgactgtgagctcaggagggggaggctctggtgggggaggttctggaggtggaggctcttcaagcgaactgactcaggatccagctgtttctgtcgccttgggacagactgtgcgcattacatgtcagggtgatagcttgcgtagctactacgcttcatggtaccagcagaagcctggacaggcacctgtcctggtgatctacggcaagaacaataggccaagcggtattcccgatcggttttctggatcctcatccggcaatactgcctctctgacaatcaccggtgctcaggctgaagatgaggctgactactactgcaactcccgagattctagcggaaatcacgtggtcttcggaggtgggacaaaacttaccgtgctc

SEQ ID NO: 2111 - protein, 506 aa, Artificial Sequence
  IGF1R13HLxI2CHL
EVQLVQSGAEVKKPGESLTISCKGPGYNFFNYWIGWVRQMPGKGLEWMGIIYPTDSDTRYSPSFQGQVTISVDKSISTAYLQWSSLKASDTAMYYCARSIRYCPGGRCYSGYYGMDVWGQGTMVTVSSGGGGSGGGGSGGGGSSSELTQDPAVSVALGQTVRITCQGDSLRSYYASWYQQKPGQAPVLVIYGKNNRPSGIPDRFSGSSSGNTASLTITGAQAEDEADYYCNSRDSSGNHVVFGGGTKLTVLSGGGGSEVQLVESGGGLVQPGGSLKLSCAASGFTFNKYAMNWVRQAPGKGLEWVARIRSKYNNYATYYADSVKDRFTISRDDSKNTAYLQMNNLKTEDTAVYYCVRHGNFGNSYISYWAYWGQGTLVTVSSGGGGSGGGGSGGGGSQTVVTQEPSLTVSPGGTVTLTCGSSTGAVTSGNYPNWVQQKPGQAPRGLIGGTKFLAPGTPARFSGSLLGGKAALTLSGVQPEDEAEYYCVLWYSNRWVFGGGTKLTVL

SEQ ID NO: 2112 - DNA, 1518 bp, Artificial Sequence
  IGF1R13HLxI2CHL
gaagtccagttggtgcagagtggtgccgaagtcaaaaagcctggcgagagcctgaccatctcatgtaagggtcctggctacaacttcttcaactactggatcggatgggtgcgacagatgcctggaaaagggctcgaatggatgggcattatctatcccaccgactccgacacacggtattccccatcatttcagggacaggtcaccatctccgttgacaagagcatctccaccgcttatctccagtggagttccctgaaagcctccgacaccgcaatgtattactgcgcacgtagtatccgttactgcccaggaggcagatgctatagcggatattacggcatggacgtttggggacagggaacaatggtgactgtgagctcaggagggggaggctctggtgggggaggttctggaggtggaggctcttcaagcgaactgactcaggatccagctgtttctgtcgccttgggacagactgtgcgcattacatgtcagggtgatagcttgcgtagctactacgcttcatggtaccagcagaagcctggacaggcacctgtcctggtgatctacggcaagaacaataggccaagcggtattcccgatcggttttctggatcctcatccggcaatactgcctctctgacaatcaccggtgctcaggctgaagatgaggctgactactactgcaactcccgagattctagcggaaatcacgtggtcttcggaggtgggacaaaacttaccgtgctctccggaggtggtggatccgaggtgcagctggtcgagtctggaggaggattggtgcagcctggagggtcattgaaactctcatgtgcagcctctggattcaccttcaataagtacgccatgaactgggtccgccaggctccaggaaagggtttggaatgggttgctcgcataagaagtaaatataataattatgcaacatattatgccgattcagtgaaagacaggttcaccatctccagagatgattcaaaaaacactgcctatctacaaatgaacaacttgaagactgaggacactgccgtgtactactgtgtgagacatgggaacttcggtaatagctacatatcctactgggcttactggggccaagggactctggtcaccgtctcctcaggtggtggtggttctggcggcggcggctccggtggtggtggttctcagactgttgtgactcaggaaccttcactcaccgtatcacctggtggaacagtcacactcacttgtggctcctcgactggggctgttacatctggcaactacccaaactgggtccaacaaaaaccaggtcaggcaccccgtggtctaataggtgggactaagttcctcgcccccggtactcctgccagattctcaggctccctgcttggaggcaaggctgccctcaccctctcaggggtacagccagaggatgaggcagaatattactgtgttctatggtacagcaaccgctgggtgttcggtggaggaaccaaactgactgtccta

SEQ ID NO: 2113 - protein, 121 aa, Artificial Sequence
  IGF1R15-H
EVQLLESGGGLVQPGGSLRLSCAASGFTFSSYAMSWVRQAPGKGLEWVSAISGSGGSTYYADSVKGRFTISRDNSKNTLYLQMNSLRAEDTAVYYCASSPYSSRWYSFDPWGQGTMVTVSS

SEQ ID NO: 2114 - protein, 5 aa, Artificial Sequence
  IGF1R15-HCDR1
SYAMS

SEQ ID NO: 2115 - protein, 17 aa, Artificial Sequence
  IGF1R15-HCDR2
AISGSGGSTYYADSVKG

SEQ ID NO: 2116 - protein, 12 aa, Artificial Sequence
  IGF1R15-HCDR3
SPYSSRWYSFDP

SEQ ID NO: 2117 - DNA, 363 bp, Artificial Sequence
  IGF1R15-H
gaggttcagctgctcgaaagcggaggcggtttggtgcagcctgggggaagcctgagacttagctgtgctgcaagcggattcaccttctccagctatgccatgagctgggtgaggcaggcccctggcaaaggactggagtgggtgagcgctatctcaggaagcggcggttctacctactacgccgatagcgtcaaggggaggttcaccatcagccgtgacaacagcaagaacaccctgtacctccagatgaatagcctgcgtgctgaggacactgccgtttactactgcgcaagctccccatactcctcacggtggtatagcttcgatccatggggacaggggactatggtgaccgtgagtagt

SEQ ID NO: 2118 - protein, 106 aa, Artificial Sequence
  IGF1R15-L
SYELTQPPSVSVSPGQTATITCSGDDLGNKYVSWYQQKPGQSPVLVIYQDTKRPSGIPERFSGSNSGNIATLTISGTQAVDEADYYCQVWDTGTVVFGGGTKLTVL

SEQ ID NO: 2119 - protein, 11 aa, Artificial Sequence
  IGF1R15-LCDR1
SGDDLGNKYVS

SEQ ID NO: 2120 - protein, 7 aa, Artificial Sequence
  IGF1R15-LCDR2
QDTKRPS

SEQ ID NO: 2121 - protein, 9 aa, Artificial Sequence
  IGF1R15-LCDR3
QVWDTGTVV

SEQ ID NO: 2122 - DNA, 318 bp, Artificial Sequence
  IGF1R15-L
agctatgaactgacacagccacctagcgtgagcgttagccctggacagactgccacaatcacctgtagtggggatgaccttggcaacaagtacgtgagctggtatcagcagaagcctggccagtctcccgtgctggtgatctaccaggacaccaaacgacctagcggaatcccagagcgattcagcggaagcaacagcgggaacatcgcaactctcaccatttccggcactcaggccgtggatgaagccgactactattgccaggtgtgggacactggaaccgtcgtgtttgggggaggcacaaaactgaccgtcctg

SEQ ID NO: 2123 - protein, 242 aa, Artificial Sequence
  IGF1R15-HL
EVQLLESGGGLVQPGGSLRLSCAASGFTFSSYAMSWVRQAPGKGLEWVSAISGSGGSTYYADSVKGRFTISRDNSKNTLYLQMNSLRAEDTAVYYCASSPYSSRWYSFDPWGQGTMVTVSSGGGGSGGGGSGGGGSSYELTQPPSVSVSPGQTATITCSGDDLGNKYVSWYQQKPGQSPVLVIYQDTKRPSGIPERFSGSNSGNIATLTISGTQAVDEADYYCQVWDTGTVVFGGGTKLTVL

SEQ ID NO: 2124 - DNA, 726 bp, Artificial Sequence
  IGF1R15-HL
gaggttcagctgctcgaaagcggaggcggtttggtgcagcctgggggaagcctgagacttagctgtgctgcaagcggattcaccttctccagctatgccatgagctgggtgaggcaggcccctggcaaaggactggagtgggtgagcgctatctcaggaagcggcggttctacctactacgccgatagcgtcaaggggaggttcaccatcagccgtgacaacagcaagaacaccctgtacctccagatgaatagcctgcgtgctgaggacactgccgtttactactgcgcaagctccccatactcctcacggtggtatagcttcgatccatggggacaggggactatggtgaccgtgagtagtggcggagggggaagcggaggaggcgggagcggcggaggcggaagcagctatgaactgacacagccacctagcgtgagcgttagccctggacagactgccacaatcacctgtagtggggatgaccttggcaacaagtacgtgagctggtatcagcagaagcctggccagtctcccgtgctggtgatctaccaggacaccaaacgacctagcggaatcccagagcgattcagcggaagcaacagcgggaacatcgcaactctcaccatttccggcactcaggccgtggatgaagccgactactattgccaggtgtgggacactggaaccgtcgtgtttgggggaggcacaaaactgaccgtcctg

SEQ ID NO: 2125 - protein, 497 aa, Artificial Sequence
  IGF1R15HLxI2CHL
EVQLLESGGGLVQPGGSLRLSCAASGFTFSSYAMSWVRQAPGKGLEWVSAISGSGGSTYYADSVKGRFTISRDNSKNTLYLQMNSLRAEDTAVYYCASSPYSSRWYSFDPWGQGTMVTVSSGGGGSGGGGSGGGGSSYELTQPPSVSVSPGQTATITCSGDDLGNKYVSWYQQKPGQSPVLVIYQDTKRPSGIPERFSGSNSGNIATLTISGTQAVDEADYYCQVWDTGTVVFGGGTKLTVLSGGGGSEVQLVESGGGLVQPGGSLKLSCAASGFTFNKYAMNWVRQAPGKGLEWVARIRSKYNNYATYYADSVKDRFTISRDDSKNTAYLQMNNLKTEDTAVYYCVRHGNFGNSYISYWAYWGQGTLVTVSSGGGGSGGGGSGGGGSQTVVTQEPSLTVSPGGTVTLTCGSSTGAVTSGNYPNWVQQKPGQAPRGLIGGTKFLAPGTPARFSGSLLGGKAALTLSGVQPEDEAEYYCVLWYSNRWVFGGGTKLTVL

SEQ ID NO: 2126 - DNA, 1491 bp, Artificial Sequence
  IGF1R15HLxI2CHL
gaggttcagctgctcgaaagcggaggcggtttggtgcagcctgggggaagcctgagacttagctgtgctgcaagcggattcaccttctccagctatgccatgagctgggtgaggcaggcccctggcaaaggactggagtgggtgagcgctatctcaggaagcggcggttctacctactacgccgatagcgtcaaggggaggttcaccatcagccgtgacaacagcaagaacaccctgtacctccagatgaatagcctgcgtgctgaggacactgccgtttactactgcgcaagctccccatactcctcacggtggtatagcttcgatccatggggacaggggactatggtgaccgtgagtagtggcggagggggaagcggaggaggcgggagcggcggaggcggaagcagctatgaactgacacagccacctagcgtgagcgttagccctggacagactgccacaatcacctgtagtggggatgaccttggcaacaagtacgtgagctggtatcagcagaagcctggccagtctcccgtgctggtgatctaccaggacaccaaacgacctagcggaatcccagagcgattcagcggaagcaacagcgggaacatcgcaactctcaccatttccggcactcaggccgtggatgaagccgactactattgccaggtgtgggacactggaaccgtcgtgtttgggggaggcacaaaactgaccgtcctgtccggaggtggtggatccgaggtgcagctggtcgagtctggaggaggattggtgcagcctggagggtcattgaaactctcatgtgcagcctctggattcaccttcaataagtacgccatgaactgggtccgccaggctccaggaaagggtttggaatgggttgctcgcataagaagtaaatataataattatgcaacatattatgccgattcagtgaaagacaggttcaccatctccagagatgattcaaaaaacactgcctatctacaaatgaacaacttgaagactgaggacactgccgtgtactactgtgtgagacatgggaacttcggtaatagctacatatcctactgggcttactggggccaagggactctggtcaccgtctcctcaggtggtggtggttctggcggcggcggctccggtggtggtggttctcagactgttgtgactcaggaaccttcactcaccgtatcacctggtggaacagtcacactcacttgtggctcctcgactggggctgttacatctggcaactacccaaactgggtccaacaaaaaccaggtcaggcaccccgtggtctaataggtgggactaagttcctcgcccccggtactcctgccagattctcaggctccctgcttggaggcaaggctgccctcaccctctcaggggtacagccagaggatgaggcagaatattactgtgttctatggtacagcaaccgctgggtgttcggtggaggaaccaaactgactgtccta

SEQ ID NO: 2127 - protein, 124 aa, Artificial Sequence
  IGF1R16-H
QVQLQQSGAELVKPGASVKLSCKASGYTFTSYWMHWVKQRPGQGLEWIGEINPSNGRTNYNEKFKRKATLTVDKSSSTAYMQLSSLTSEDSAVYYFARGRPDYYGSSKWYFDVWGAGTTVTVSS

SEQ ID NO: 2128 - protein, 5 aa, Artificial Sequence
  IGF1R16-HCDR1
SYWMH

SEQ ID NO: 2129 - protein, 17 aa, Artificial Sequence
  IGF1R16-HCDR2
EINPSNGRTNYNEKFKR

SEQ ID NO: 2130 - protein, 15 aa, Artificial Sequence
  IGF1R16-HCDR3
GRPDYYGSSKWYFDV

SEQ ID NO: 2131 - DNA, 372 bp, Artificial Sequence
  IGF1R16-H
caggttcagctgcagcagagcggagctgagctcgttaaacctggtgcttccgtgaaactgagctgcaaagcctccggctataccttcacaagctactggatgcactgggtcaaacagcgtcctggtcagggtctcgaatggattggggagatcaacccctccaacggccgcaccaattacaatgagaagttcaagcggaaggccacccttaccgtggataagagctcatctaccgcctacatgcagctgtcttcactgacatctgaggactctgccgtgtattactttgcaagagggaggcctgactactacgggtcatccaagtggtactttgacgtctggggagctgggactaccgtgactgtgtctagc

SEQ ID NO: 2132 - protein, 112 aa, Artificial Sequence
  IGF1R16-L
DVLMTQTPLSLPVSLGDQASISCRSSQSIVHSNVNTYLEWYLQKPGQSPKLLIYKVSNRFSGVPDRFSGSGSGTDFTLRISRVEAEDLGIYYCFQGSHVPPTFGGGTKLEIK

SEQ ID NO: 2133 - protein, 16 aa, Artificial Sequence
  IGF1R16-LCDR1
RSSQSIVHSNVNTYLE

SEQ ID NO: 2134 - protein, 7 aa, Artificial Sequence
  IGF1R16-LCDR2
KVSNRFS

SEQ ID NO: 2135 - protein, 9 aa, Artificial Sequence
  IGF1R16-LCDR3
FQGSHVPPT

SEQ ID NO: 2136 - DNA, 336 bp, Artificial Sequence
  IGF1R16-L
gatgtcttgatgactcagactccactgtcacttcctgtgtcactgggagatcaggcatccattagctgcaggagtagccagagcatcgtgcactccaacgtcaacacatacctggagtggtacctgcagaaacctggccagagcccaaagctgctcatctacaaggtgagcaatcggttttccggcgttcccgatagattcagcggaagcggaagcggtacagactttaccctgcgcatttctcgagtggaagccgaagacctgggcatctactattgcttccagggttctcatgttcccccaaccttcggtggcggaacaaaactcgaaatcaag

SEQ ID NO: 2137 - protein, 251 aa, Artificial Sequence
  IGF1R16-HL
QVQLQQSGAELVKPGASVKLSCKASGYTFTSYWMHWVKQRPGQGLEWIGEINPSNGRTNYNEKFKRKATLTVDKSSSTAYMQLSSLTSEDSAVYYFARGRPDYYGSSKWYFDVWGAGTTVTVSSGGGGSGGGGSGGGGSDVLMTQTPLSLPVSLGDQASISCRSSQSIVHSNVNTYLEWYLQKPGQSPKLLIYKVSNRFSGVPDRFSGSGSGTDFTLRISRVEAEDLGIYYCFQGSHVPPTFGGGTKLEIK

SEQ ID NO: 2138 - DNA, 753 bp, Artificial Sequence
  IGF1R16-HL
caggttcagctgcagcagagcggagctgagctcgttaaacctggtgcttccgtgaaactgagctgcaaagcctccggctataccttcacaagctactggatgcactgggtcaaacagcgtcctggtcagggtctcgaatggattggggagatcaacccctccaacggccgcaccaattacaatgagaagttcaagcggaaggccacccttaccgtggataagagctcatctaccgcctacatgcagctgtcttcactgacatctgaggactctgccgtgtattactttgcaagagggaggcctgactactacgggtcatccaagtggtactttgacgtctggggagctgggactaccgtgactgtgtctagcggaggcggagggagcggagggggaggctccggtggcgggggatctgatgtcttgatgactcagactccactgtcacttcctgtgtcactgggagatcaggcatccattagctgcaggagtagccagagcatcgtgcactccaacgtcaacacatacctggagtggtacctgcagaaacctggccagagcccaaagctgctcatctacaaggtgagcaatcggttttccggcgttcccgatagattcagcggaagcggaagcggtacagactttaccctgcgcatttctcgagtggaagccgaagacctgggcatctactattgcttccagggttctcatgttcccccaaccttcggtggcggaacaaaactcgaaatcaag

SEQ ID NO: 2139 - protein, 506 aa, Artificial Sequence
  IGF1R16HLxI2CHL
QVQLQQSGAELVKPGASVKLSCKASGYTFTSYWMHWVKQRPGQGLEWIGEINPSNGRTNYNEKFKRKATLTVDKSSSTAYMQLSSLTSEDSAVYYFARGRPDYYGSSKWYFDVWGAGTTVTVSSGGGGSGGGGSGGGGSDVLMTQTPLSLPVSLGDQASISCRSSQSIVHSNVNTYLEWYLQKPGQSPKLLIYKVSNRFSGVPDRFSGSGSGTDFTLRISRVEAEDLGIYYCFQGSHVPPTFGGGTKLEIKSGGGGSEVQLVESGGGLVQPGGSLKLSCAASGFTFNKYAMNWVRQAPGKGLEWVARIRSKYNNYATYYADSVKDRFTISRDDSKNTAYLQMNNLKTEDTAVYYCVRHGNFGNSYISYWAYWGQGTLVTVSSGGGGSGGGGSGGGGSQTVVTQEPSLTVSPGGTVTLTCGSSTGAVTSGNYPNWVQQKPGQAPRGLIGGTKFLAPGTPARFSGSLLGGKAALTLSGVQPEDEAEYYCVLWYSNRWVFGGGTKLTVL

SEQ ID NO: 2140 - DNA, 1518 bp, Artificial Sequence
  IGF1R16HLxI2CHL
caggttcagctgcagcagagcggagctgagctcgttaaacctggtgcttccgtgaaactgagctgcaaagcctccggctataccttcacaagctactggatgcactgggtcaaacagcgtcctggtcagggtctcgaatggattggggagatcaacccctccaacggccgcaccaattacaatgagaagttcaagcggaaggccacccttaccgtggataagagctcatctaccgcctacatgcagctgtcttcactgacatctgaggactctgccgtgtattactttgcaagagggaggcctgactactacgggtcatccaagtggtactttgacgtctggggagctgggactaccgtgactgtgtctagcggaggcggagggagcggagggggaggctccggtggcgggggatctgatgtcttgatgactcagactccactgtcacttcctgtgtcactgggagatcaggcatccattagctgcaggagtagccagagcatcgtgcactccaacgtcaacacatacctggagtggtacctgcagaaacctggccagagcccaaagctgctcatctacaaggtgagcaatcggttttccggcgttcccgatagattcagcggaagcggaagcggtacagactttaccctgcgcatttctcgagtggaagccgaagacctgggcatctactattgcttccagggttctcatgttcccccaaccttcggtggcggaacaaaactcgaaatcaagtccggaggtggtggatccgaggtgcagctggtcgagtctggaggaggattggtgcagcctggagggtcattgaaactctcatgtgcagcctctggattcaccttcaataagtacgccatgaactgggtccgccaggctccaggaaagggtttggaatgggttgctcgcataagaagtaaatataataattatgcaacatattatgccgattcagtgaaagacaggttcaccatctccagagatgattcaaaaaacactgcctatctacaaatgaacaacttgaagactgaggacactgccgtgtactactgtgtgagacatgggaacttcggtaatagctacatatcctactgggcttactggggccaagggactctggtcaccgtctcctcaggtggtggtggttctggcggcggcggctccggtggtggtggttctcagactgttgtgactcaggaaccttcactcaccgtatcacctggtggaacagtcacactcacttgtggctcctcgactggggctgttacatctggcaactacccaaactgggtccaacaaaaaccaggtcaggcaccccgtggtctaataggtgggactaagttcctcgcccccggtactcctgccagattctcaggctccctgcttggaggcaaggctgccctcaccctctcaggggtacagccagaggatgaggcagaatattactgtgttctatggtacagcaaccgctgggtgttcggtggaggaaccaaactgactgtccta

SEQ ID NO: 2141 - protein, 125 aa, Artificial Sequence
  IGF1R17-H
QAQLVESGGGLVKPGGSLRLSCAASGFTFSDYYMSWIRQAPGKGLEWVSYISSSGSTRDYADSVKGRFTISRDNAKNSLYLQMNSLRAEDTAVYYCVRDGVETTFYYYYYGMDVWGQGTTVTVSS

SEQ ID NO: 2142 - protein, 5 aa, Artificial Sequence
  IGF1R17-HCDR1
DYYMS

SEQ ID NO: 2143 - protein, 17 aa, Artificial Sequence
  IGF1R17-HCDR2
YISSSGSTRDYADSVKG

SEQ ID NO: 2144 - protein, 16 aa, Artificial Sequence
  IGF1R17-HCDR3
DGVETTFYYYYYGMDV

SEQ ID NO: 2145 - DNA, 375 bp, Artificial Sequence
  IGF1R17-H
caggcacagctggtggaaagtggcggtggcttagttaagcctggtggatccctgcgactttcttgtgctgcctccggctttacgttttccgactactacatgtcctggattagacaagcccctggcaagggcttggaatgggtgagctacataagctcctcgggaagcactagggactatgccgatagcgttaaggggagattcacgataagcagggataacgccaagaactccctgtatctgcagatgaatagtctccgtgctgaggacactgccgtgtactattgcgtgagggatggcgtcgaaacaaccttctactactactactatggcatggacgtttggggacagggaacaactgtaaccgtgagctca

SEQ ID NO: 2146 - protein, 107 aa, Artificial Sequence
  IGF1R17-L
DIQMTQSPSSLSASVGDRVTFTCRASQDIRRDLGWYQQKPGKAPKRLIYAASRLQSGVPSRFSGSGSGTEFTLTISSLQPEDFATYYCLQHNNYPRTFGQGTEVEII

SEQ ID NO: 2147 - protein, 11 aa, Artificial Sequence
  IGF1R17-LCDR1
RASQDIRRDLG

SEQ ID NO: 2148 - protein, 7 aa, Artificial Sequence
  IGF1R17-LCDR2
AASRLQS

SEQ ID NO: 2149 - protein, 9 aa, Artificial Sequence
  IGF1R17-LCDR3
LQHNNYPRT

SEQ ID NO: 2150 - DNA, 321 bp, Artificial Sequence
  IGF1R17-L
gatatccagatgacacaaagcccaagctcgctgagcgctagcgtaggcgatcgagtgacattcacctgtagggctagccaggatattagacgggacctagggtggtaccagcagaaacctggcaaagctcccaaacgccttatctatgcggcttcacggctgcaatcgggagtcccctctcgcttttctggaagtgggagcggaaccgagtttacattgacgattagctccctccaacctgaggactttgcaacctattactgcctccagcacaataactatccacggaccttcggacaagggaccgaggtcgagatcatc

SEQ ID NO: 2151 - protein, 247 aa, Artificial Sequence
  IGF1R17-HL
QAQLVESGGGLVKPGGSLRLSCAASGFTFSDYYMSWIRQAPGKGLEWVSYISSSGSTRDYADSVKGRFTISRDNAKNSLYLQMNSLRAEDTAVYYCVRDGVETTFYYYYYGMDVWGQGTTVTVSSGGGGSGGGGSGGGGSDIQMTQSPSSLSASVGDRVTFTCRASQDIRRDLGWYQQKPGKAPKRLIYAASRLQSGVPSRFSGSGSGTEFTLTISSLQPEDFATYYCLQHNNYPRTFGQGTEVEII

SEQ ID NO: 2152 - DNA, 741 bp, Artificial Sequence
  IGF1R17-HL
caggcacagctggtggaaagtggcggtggcttagttaagcctggtggatccctgcgactttcttgtgctgcctccggctttacgttttccgactactacatgtcctggattagacaagcccctggcaagggcttggaatgggtgagctacataagctcctcgggaagcactagggactatgccgatagcgttaaggggagattcacgataagcagggataacgccaagaactccctgtatctgcagatgaatagtctccgtgctgaggacactgccgtgtactattgcgtgagggatggcgtcgaaacaaccttctactactactactatggcatggacgtttggggacagggaacaactgtaaccgtgagctcaggaggtggaggtagcggaggtggaggtagtggtggaggtggctcggatatccagatgacacaaagcccaagctcgctgagcgctagcgtaggcgatcgagtgacattcacctgtagggctagccaggatattagacgggacctagggtggtaccagcagaaacctggcaaagctcccaaacgccttatctatgcggcttcacggctgcaatcgggagtcccctctcgcttttctggaagtgggagcggaaccgagtttacattgacgattagctccctccaacctgaggactttgcaacctattactgcctccagcacaataactatccacggaccttcggacaagggaccgaggtcgagatcatc

SEQ ID NO: 2153 - protein, 502 aa, Artificial Sequence
  IGF1R17HLxI2CHL
QAQLVESGGGLVKPGGSLRLSCAASGFTFSDYYMSWIRQAPGKGLEWVSYISSSGSTRDYADSVKGRFTISRDNAKNSLYLQMNSLRAEDTAVYYCVRDGVETTFYYYYYGMDVWGQGTTVTVSSGGGGSGGGGSGGGGSDIQMTQSPSSLSASVGDRVTFTCRASQDIRRDLGWYQQKPGKAPKRLIYAASRLQSGVPSRFSGSGSGTEFTLTISSLQPEDFATYYCLQHNNYPRTFGQGTEVEIISGGGGSEVQLVESGGGLVQPGGSLKLSCAASGFTFNKYAMNWVRQAPGKGLEWVARIRSKYNNYATYYADSVKDRFTISRDDSKNTAYLQMNNLKTEDTAVYYCVRHGNFGNSYISYWAYWGQGTLVTVSSGGGGSGGGGSGGGGSQTVVTQEPSLTVSPGGTVTLTCGSSTGAVTSGNYPNWVQQKPGQAPRGLIGGTKFLAPGTPARFSGSLLGGKAALTLSGVQPEDEAEYYCVLWYSNRWVFGGGTKLTVL

SEQ ID NO: 2154 - DNA, 1506 bp, Artificial Sequence
  IGF1R17HLxI2CHL
caggcacagctggtggaaagtggcggtggcttagttaagcctggtggatccctgcgactttcttgtgctgcctccggctttacgttttccgactactacatgtcctggattagacaagcccctggcaagggcttggaatgggtgagctacataagctcctcgggaagcactagggactatgccgatagcgttaaggggagattcacgataagcagggataacgccaagaactccctgtatctgcagatgaatagtctccgtgctgaggacactgccgtgtactattgcgtgagggatggcgtcgaaacaaccttctactactactactatggcatggacgtttggggacagggaacaactgtaaccgtgagctcaggaggtggaggtagcggaggtggaggtagtggtggaggtggctcggatatccagatgacacaaagcccaagctcgctgagcgctagcgtaggcgatcgagtgacattcacctgtagggctagccaggatattagacgggacctagggtggtaccagcagaaacctggcaaagctcccaaacgccttatctatgcggcttcacggctgcaatcgggagtcccctctcgcttttctggaagtgggagcggaaccgagtttacattgacgattagctccctccaacctgaggactttgcaacctattactgcctccagcacaataactatccacggaccttcggacaagggaccgaggtcgagatcatctccggaggtggtggatccgaggtgcagctggtcgagtctggaggaggattggtgcagcctggagggtcattgaaactctcatgtgcagcctctggattcaccttcaataagtacgccatgaactgggtccgccaggctccaggaaagggtttggaatgggttgctcgcataagaagtaaatataataattatgcaacatattatgccgattcagtgaaagacaggttcaccatctccagagatgattcaaaaaacactgcctatctacaaatgaacaacttgaagactgaggacactgccgtgtactactgtgtgagacatgggaacttcggtaatagctacatatcctactgggcttactggggccaagggactctggtcaccgtctcctcaggtggtggtggttctggcggcggcggctccggtggtggtggttctcagactgttgtgactcaggaaccttcactcaccgtatcacctggtggaacagtcacactcacttgtggctcctcgactggggctgttacatctggcaactacccaaactgggtccaacaaaaaccaggtcaggcaccccgtggtctaataggtgggactaagttcctcgcccccggtactcctgccagattctcaggctccctgcttggaggcaaggctgccctcaccctctcaggggtacagccagaggatgaggcagaatattactgtgttctatggtacagcaaccgctgggtgttcggtggaggaaccaaactgactgtccta

SEQ ID NO: 2155 - protein, 125 aa, Artificial Sequence
  IGF1R19-H
EVQLLESGGGLVQPGGSLRLSCAASGFTFSSYAMSWVRQAPGKGLEWVSAISGSGGITYYADSVKGRFTISRDNSKNTLYLQMNSLRAEDTAVYYCAKDLGYGDFYYYYYGMDVWGQGTTVTVSS

SEQ ID NO: 2156 - protein, 5 aa, Artificial Sequence
  IGF1R19-HCDR1
SYAMS

SEQ ID NO: 2157 - protein, 17 aa, Artificial Sequence
  IGF1R19-HCDR2
AISGSGGITYYADSVKG

SEQ ID NO: 2158 - protein, 16 aa, Artificial Sequence
  IGF1R19-HCDR3
DLGYGDFYYYYYGMDV

SEQ ID NO: 2159 - DNA, 375 bp, Artificial Sequence
  IGF1R19-H
gaggttcagctgcttgaatctggcggaggtttggttcagcctgggggttcacttcgtctgagctgtgctgccagcgggtttacattctcctcatatgccatgtcctgggtgcgacaggcaccaggcaaaggcttggaatgggtgtccgctattagcggaagcggaggcatcacatactacgctgatagcgtcaaggggagattcaccatctcacgggacaattccaagaacaccctgtatctccagatgaactccctgcgtgccgaagatactgccgtgtactattgcgccaaggatcttggctacggggacttctactactactactatgggatggacgtgtggggacagggaacaaccgtgactgtgagctct

SEQ ID NO: 2160 - protein, 107 aa, Artificial Sequence
  IGF1R19-L
DIQMTQSPSSLSASVGDRVTITCRASQGIRSDLGWFQQKPGKAPKRLIYAASKLHRGVPSRFSGSGSGTEFTLTISRLQPEDFATYYCLQHNSYPLTFGGGTKVEIK

SEQ ID NO: 2161 - protein, 11 aa, Artificial Sequence
  IGF1R19-LCDR1
RASQGIRSDLG

SEQ ID NO: 2162 - protein, 7 aa, Artificial Sequence
  IGF1R19-LCDR2
AASKLHR

SEQ ID NO: 2163 - protein, 9 aa, Artificial Sequence
  IGF1R19-LCDR3
LQHNSYPLT

SEQ ID NO: 2164 - DNA, 321 bp, Artificial Sequence
  IGF1R19-L
gacattcagatgactcagagcccaagctctctgtctgcttctgtgggagaccgcgttaccatcacctgtagagcaagccagggcattcgatccgatctcggatggtttcagcagaaacctggcaaggcacccaaacggctgatctatgctgccagcaaactgcataggggagtgccctcacgctttagcggatctggtagtggtaccgagttcacactgacaatctcacggctgcagcctgaggatttcgccacctattactgcctccagcacaattcctacccactgacctttggcggtgggactaaggtcgagatcaag

SEQ ID NO: 2165 - protein, 247 aa, Artificial Sequence
  IGF1R19-HL
EVQLLESGGGLVQPGGSLRLSCAASGFTFSSYAMSWVRQAPGKGLEWVSAISGSGGITYYADSVKGRFTISRDNSKNTLYLQMNSLRAEDTAVYYCAKDLGYGDFYYYYYGMDVWGQGTTVTVSSGGGGSGGGGSGGGGSDIQMTQSPSSLSASVGDRVTITCRASQGIRSDLGWFQQKPGKAPKRLIYAASKLHRGVPSRFSGSGSGTEFTLTISRLQPEDFATYYCLQHNSYPLTFGGGTKVEIK

SEQ ID NO: 2166 - DNA, 741 bp, Artificial Sequence
  IGF1R19-HL
gaggttcagctgcttgaatctggcggaggtttggttcagcctgggggttcacttcgtctgagctgtgctgccagcgggtttacattctcctcatatgccatgtcctgggtgcgacaggcaccaggcaaaggcttggaatgggtgtccgctattagcggaagcggaggcatcacatactacgctgatagcgtcaaggggagattcaccatctcacgggacaattccaagaacaccctgtatctccagatgaactccctgcgtgccgaagatactgccgtgtactattgcgccaaggatcttggctacggggacttctactactactactatgggatggacgtgtggggacagggaacaaccgtgactgtgagctctggtggcggaggatctggcggaggtggaagcggagggggagggagcgacattcagatgactcagagcccaagctctctgtctgcttctgtgggagaccgcgttaccatcacctgtagagcaagccagggcattcgatccgatctcggatggtttcagcagaaacctggcaaggcacccaaacggctgatctatgctgccagcaaactgcataggggagtgccctcacgctttagcggatctggtagtggtaccgagttcacactgacaatctcacggctgcagcctgaggatttcgccacctattactgcctccagcacaattcctacccactgacctttggcggtgggactaaggtcgagatcaag

SEQ ID NO: 2167 - protein, 502 aa, Artificial Sequence
  IGF1R19HLxI2CHL
EVQLLESGGGLVQPGGSLRLSCAASGFTFSSYAMSWVRQAPGKGLEWVSAISGSGGITYYADSVKGRFTISRDNSKNTLYLQMNSLRAEDTAVYYCAKDLGYGDFYYYYYGMDVWGQGTTVTVSSGGGGSGGGGSGGGGSDIQMTQSPSSLSASVGDRVTITCRASQGIRSDLGWFQQKPGKAPKRLIYAASKLHRGVPSRFSGSGSGTEFTLTISRLQPEDFATYYCLQHNSYPLTFGGGTKVEIKSGGGGSEVQLVESGGGLVQPGGSLKLSCAASGFTFNKYAMNWVRQAPGKGLEWVARIRSKYNNYATYYADSVKDRFTISRDDSKNTAYLQMNNLKTEDTAVYYCVRHGNFGNSYISYWAYWGQGTLVTVSSGGGGSGGGGSGGGGSQTVVTQEPSLTVSPGGTVTLTCGSSTGAVTSGNYPNWVQQKPGQAPRGLIGGTKFLAPGTPARFSGSLLGGKAALTLSGVQPEDEAEYYCVLWYSNRWVFGGGTKLTVL

SEQ ID NO: 2168 - DNA, 1506 bp, Artificial Sequence
  IGF1R19HLxI2CHL
gaggttcagctgcttgaatctggcggaggtttggttcagcctgggggttcacttcgtctgagctgtgctgccagcgggtttacattctcctcatatgccatgtcctgggtgcgacaggcaccaggcaaaggcttggaatgggtgtccgctattagcggaagcggaggcatcacatactacgctgatagcgtcaaggggagattcaccatctcacgggacaattccaagaacaccctgtatctccagatgaactccctgcgtgccgaagatactgccgtgtactattgcgccaaggatcttggctacggggacttctactactactactatgggatggacgtgtggggacagggaacaaccgtgactgtgagctctggtggcggaggatctggcggaggtggaagcggagggggagggagcgacattcagatgactcagagcccaagctctctgtctgcttctgtgggagaccgcgttaccatcacctgtagagcaagccagggcattcgatccgatctcggatggtttcagcagaaacctggcaaggcacccaaacggctgatctatgctgccagcaaactgcataggggagtgccctcacgctttagcggatctggtagtggtaccgagttcacactgacaatctcacggctgcagcctgaggatttcgccacctattactgcctccagcacaattcctacccactgacctttggcggtgggactaaggtcgagatcaagtccggaggtggtggatccgaggtgcagctggtcgagtctggaggaggattggtgcagcctggagggtcattgaaactctcatgtgcagcctctggattcaccttcaataagtacgccatgaactgggtccgccaggctccaggaaagggtttggaatgggttgctcgcataagaagtaaatataataattatgcaacatattatgccgattcagtgaaagacaggttcaccatctccagagatgattcaaaaaacactgcctatctacaaatgaacaacttgaagactgaggacactgccgtgtactactgtgtgagacatgggaacttcggtaatagctacatatcctactgggcttactggggccaagggactctggtcaccgtctcctcaggtggtggtggttctggcggcggcggctccggtggtggtggttctcagactgttgtgactcaggaaccttcactcaccgtatcacctggtggaacagtcacactcacttgtggctcctcgactggggctgttacatctggcaactacccaaactgggtccaacaaaaaccaggtcaggcaccccgtggtctaataggtgggactaagttcctcgcccccggtactcctgccagattctcaggctccctgcttggaggcaaggctgccctcaccctctcaggggtacagccagaggatgaggcagaatattactgtgttctatggtacagcaaccgctgggtgttcggtggaggaaccaaactgactgtccta

SEQ ID NO: 2169 - protein, 121 aa, Artificial Sequence
  IGF1R20-H
QIQLVQSGPELKKPGETVKISCKASGYNLANYGLNWVKQAPGEGLKWMGWINTNTGAPTYAEEFKGRFVFFLETSASTAYLQINNLSDEDTATYFCARSIYYYASRYFNVWGAGTSVTVSS

SEQ ID NO: 2170 - protein, 13 aa, Artificial Sequence
  IGF1R20-HCDR1
KASGYNLANYGLN

SEQ ID NO: 2171 - protein, 17 aa, Artificial Sequence
  IGF1R20-HCDR2
WINTNTGAPTYAEEFKG

SEQ ID NO: 2172 - protein, 12 aa, Artificial Sequence
  IGF1R20-HCDR3
SIYYYASRYFNV

SEQ ID NO: 2173 - DNA, 363 bp, Artificial Sequence
  IGF1R20-H
cagatccagctggtgcagagcggacctgagcttaagaagcctggcgagaccgtcaagatctcatgcaaagctagcggatacaacctggccaactatggcctcaactgggtgaaacaggcccctggagagggcctgaagtggatgggatggatcaacaccaatactggcgccccaacatacgcagaggaatttaaggggaggttcgtgttcttcctggaaacctccgctagtactgcctacctgcagatcaacaacctctccgatgaagataccgccacctacttttgtgcccgctctatctactactacgcatccaggtacttcaatgtctggggagccggaacctccgtgactgttagctct

SEQ ID NO: 2174 - protein, 107 aa, Artificial Sequence
  IGF1R20-L
DIQMTQTTSSLSASLGDKVTISCRASQDISNYLNWYQQKPDGTIKLLIYYTSRLHSGIPSRFSGSGSGTDYSLTISNLEQEDIATYFCQQGNTLPWTFGGGTKVEIK

SEQ ID NO: 2175 - protein, 11 aa, Artificial Sequence
  IGF1R20-LCDR1
RASQDISNYLN

SEQ ID NO: 2176 - protein, 7 aa, Artificial Sequence
  IGF1R20-LCDR2
YTSRLHS

SEQ ID NO: 2177 - protein, 9 aa, Artificial Sequence
  IGF1R20-LCDR3
QQGNTLPWT

SEQ ID NO: 2178 - DNA, 321 bp, Artificial Sequence
  IGF1R20-L
gatatccagatgacacagactacatcttccctctccgcttcacttggcgacaaagtcaccatttcatgccgtgcaagccaggacatcagcaactacctcaattggtaccagcagaaacccgacgggacaatcaagctgctgatctactacacaagccgactgcacagcgggattccatcaagattcagcggaagcggaagtgggaccgattacagcttgacaatcagcaatctggagcaggaggacatcgctacttacttttgccagcaggggaataccttgccatggacatttgggggcggtaccaaagtggaaatcaag

SEQ ID NO: 2179 - protein, 243 aa, Artificial Sequence
  IGF1R20-HL
QIQLVQSGPELKKPGETVKISCKASGYNLANYGLNWVKQAPGEGLKWMGWINTNTGAPTYAEEFKGRFVFFLETSASTAYLQINNLSDEDTATYFCARSIYYYASRYFNVWGAGTSVTVSSGGGGSGGGGSGGGGSDIQMTQTTSSLSASLGDKVTISCRASQDISNYLNWYQQKPDGTIKLLIYYTSRLHSGIPSRFSGSGSGTDYSLTISNLEQEDIATYFCQQGNTLPWTFGGGTKVEIK

SEQ ID NO: 2180 - DNA, 729 bp, Artificial Sequence
  IGF1R20-HL
cagatccagctggtgcagagcggacctgagcttaagaagcctggcgagaccgtcaagatctcatgcaaagctagcggatacaacctggccaactatggcctcaactgggtgaaacaggcccctggagagggcctgaagtggatgggatggatcaacaccaatactggcgccccaacatacgcagaggaatttaaggggaggttcgtgttcttcctggaaacctccgctagtactgcctacctgcagatcaacaacctctccgatgaagataccgccacctacttttgtgcccgctctatctactactacgcatccaggtacttcaatgtctggggagccggaacctccgtgactgttagctctggaggaggcggtagcggtggcggtggaagtggcggaggtggctctgatatccagatgacacagactacatcttccctctccgcttcacttggcgacaaagtcaccatttcatgccgtgcaagccaggacatcagcaactacctcaattggtaccagcagaaacccgacgggacaatcaagctgctgatctactacacaagccgactgcacagcgggattccatcaagattcagcggaagcggaagtgggaccgattacagcttgacaatcagcaatctggagcaggaggacatcgctacttacttttgccagcaggggaataccttgccatggacatttgggggcggtaccaaagtggaaatcaag

SEQ ID NO: 2181 - protein, 498 aa, Artificial Sequence
  IGF1R20HLxI2CHL
QIQLVQSGPELKKPGETVKISCKASGYNLANYGLNWVKQAPGEGLKWMGWINTNTGAPTYAEEFKGRFVFFLETSASTAYLQINNLSDEDTATYFCARSIYYYASRYFNVWGAGTSVTVSSGGGGSGGGGSGGGGSDIQMTQTTSSLSASLGDKVTISCRASQDISNYLNWYQQKPDGTIKLLIYYTSRLHSGIPSRFSGSGSGTDYSLTISNLEQEDIATYFCQQGNTLPWTFGGGTKVEIKSGGGGSEVQLVESGGGLVQPGGSLKLSCAASGFTFNKYAMNWVRQAPGKGLEWVARIRSKYNNYATYYADSVKDRFTISRDDSKNTAYLQMNNLKTEDTAVYYCVRHGNFGNSYISYWAYWGQGTLVTVSSGGGGSGGGGSGGGGSQTVVTQEPSLTVSPGGTVTLTCGSSTGAVTSGNYPNWVQQKPGQAPRGLIGGTKFLAPGTPARFSGSLLGGKAALTLSGVQPEDEAEYYCVLWYSNRWVFGGGTKLTVL

SEQ ID NO: 2182 - DNA, 1494 bp, Artificial Sequence
  IGF1R20HLxI2CHL
cagatccagctggtgcagagcggacctgagcttaagaagcctggcgagaccgtcaagatctcatgcaaagctagcggatacaacctggccaactatggcctcaactgggtgaaacaggcccctggagagggcctgaagtggatgggatggatcaacaccaatactggcgccccaacatacgcagaggaatttaaggggaggttcgtgttcttcctggaaacctccgctagtactgcctacctgcagatcaacaacctctccgatgaagataccgccacctacttttgtgcccgctctatctactactacgcatccaggtacttcaatgtctggggagccggaacctccgtgactgttagctctggaggaggcggtagcggtggcggtggaagtggcggaggtggctctgatatccagatgacacagactacatcttccctctccgcttcacttggcgacaaagtcaccatttcatgccgtgcaagccaggacatcagcaactacctcaattggtaccagcagaaacccgacgggacaatcaagctgctgatctactacacaagccgactgcacagcgggattccatcaagattcagcggaagcggaagtgggaccgattacagcttgacaatcagcaatctggagcaggaggacatcgctacttacttttgccagcaggggaataccttgccatggacatttgggggcggtaccaaagtggaaatcaagtccggaggtggtggatccgaggtgcagctggtcgagtctggaggaggattggtgcagcctggagggtcattgaaactctcatgtgcagcctctggattcaccttcaataagtacgccatgaactgggtccgccaggctccaggaaagggtttggaatgggttgctcgcataagaagtaaatataataattatgcaacatattatgccgattcagtgaaagacaggttcaccatctccagagatgattcaaaaaacactgcctatctacaaatgaacaacttgaagactgaggacactgccgtgtactactgtgtgagacatgggaacttcggtaatagctacatatcctactgggcttactggggccaagggactctggtcaccgtctcctcaggtggtggtggttctggcggcggcggctccggtggtggtggttctcagactgttgtgactcaggaaccttcactcaccgtatcacctggtggaacagtcacactcacttgtggctcctcgactggggctgttacatctggcaactacccaaactgggtccaacaaaaaccaggtcaggcaccccgtggtctaataggtgggactaagttcctcgcccccggtactcctgccagattctcaggctccctgcttggaggcaaggctgccctcaccctctcaggggtacagccagaggatgaggcagaatattactgtgttctatggtacagcaaccgctgggtgttcggtggaggaaccaaactgactgtccta

SEQ ID NO: 2183 - protein, 121 aa, Artificial Sequence
  IGF1R21-H
QIQLVQSGPELKKPGETVKISCKASGYTLANYGMNWVKQAPGKGFKWMGWINTNTGKPTYSDEFKGRFVFSLETSASTAYLLINNLSNEDTATYFCARSIYYYGSRYFNVWGAGTTVTVSS

SEQ ID NO: 2184 - protein, 13 aa, Artificial Sequence
  IGF1R21-HCDR1
KASGYTLANYGMN

SEQ ID NO: 2185 - protein, 17 aa, Artificial Sequence
  IGF1R21-HCDR2
WINTNTGKPTYSDEFKG

SEQ ID NO: 2186 - protein, 12 aa, Artificial Sequence
  IGF1R21-HCDR3
SIYYYGSRYFNV

SEQ ID NO: 2187 - DNA, 363 bp, Artificial Sequence
  IGF1R21-H
cagatccagcttgtccagagtggtcccgagctgaagaaacctggcgaaaccgtgaaaatcagctgcaaggcaagcggctatacactggccaactatggcatgaattgggtgaagcaggcacctgggaagggtttcaagtggatgggctggatcaacaccaacactggcaaaccaacctattccgacgagttcaaggggcgtttcgtgttttcactggaaacctccgcatcaaccgcttacctcttgatcaacaacctgagcaacgaggacaccgccacatacttctgcgctaggagcatctactactatgggagccgctacttcaatgtgtggggagctgggacaactgttactgtgagctca

SEQ ID NO: 2188 - protein, 107 aa, Artificial Sequence
  IGF1R21-L
DIQMTQSTSSLSASLGDRVTISCRASQDINNYLTWYQQKPDGTVKLLIYYTSRLHSGVPSRFSGSGSGTDYSLTITNLEQEDFATYFCQQGNTLPWTFGEGTKVEIK

SEQ ID NO: 2189 - protein, 11 aa, Artificial Sequence
  IGF1R21-LCDR1
RASQDINNYLT

SEQ ID NO: 2190 - protein, 7 aa, Artificial Sequence
  IGF1R21-LCDR2
YTSRLHS

SEQ ID NO: 2191 - protein, 9 aa, Artificial Sequence
  IGF1R21-LCDR3
QQGNTLPWT

SEQ ID NO: 2192 - DNA, 321 bp, Artificial Sequence
  IGF1R21-L
gatatccagatgacacagagcacaagttcattgtccgcctctcttggcgatcgagtgaccattagctgccgagcaagccaggacattaacaactacctgacctggtatcagcagaaacccgacgggactgtgaagctgctgatctattacacctctagactgcacagtggcgttcctagccggtttagcggatccggtagcggaacagattactccctgaccatcaccaatctcgagcaggaagactttgccacctacttttgccagcagggcaatactctcccatggacatttggtgaggggaccaaagtcgagattaag

SEQ ID NO: 2193 - protein, 243 aa, Artificial Sequence
  IGF1R21-HL
QIQLVQSGPELKKPGETVKISCKASGYTLANYGMNWVKQAPGKGFKWMGWINTNTGKPTYSDEFKGRFVFSLETSASTAYLLINNLSNEDTATYFCARSIYYYGSRYFNVWGAGTTVTVSSGGGGSGGGGSGGGGSDIQMTQSTSSLSASLGDRVTISCRASQDINNYLTWYQQKPDGTVKLLIYYTSRLHSGVPSRFSGSGSGTDYSLTITNLEQEDFATYFCQQGNTLPWTFGEGTKVEIK

SEQ ID NO: 2194 - DNA, 729 bp, Artificial Sequence
  IGF1R21-HL
cagatccagcttgtccagagtggtcccgagctgaagaaacctggcgaaaccgtgaaaatcagctgcaaggcaagcggctatacactggccaactatggcatgaattgggtgaagcaggcacctgggaagggtttcaagtggatgggctggatcaacaccaacactggcaaaccaacctattccgacgagttcaaggggcgtttcgtgttttcactggaaacctccgcatcaaccgcttacctcttgatcaacaacctgagcaacgaggacaccgccacatacttctgcgctaggagcatctactactatgggagccgctacttcaatgtgtggggagctgggacaactgttactgtgagctcaggagggggaggtagcggaggaggcggtagcggaggcggtggatccgatatccagatgacacagagcacaagttcattgtccgcctctcttggcgatcgagtgaccattagctgccgagcaagccaggacattaacaactacctgacctggtatcagcagaaacccgacgggactgtgaagctgctgatctattacacctctagactgcacagtggcgttcctagccggtttagcggatccggtagcggaacagattactccctgaccatcaccaatctcgagcaggaagactttgccacctacttttgccagcagggcaatactctcccatggacatttggtgaggggaccaaagtcgagattaag

SEQ ID NO: 2195 - protein, 498 aa, Artificial Sequence
  IGF1R21HLxI2CHL
QIQLVQSGPELKKPGETVKISCKASGYTLANYGMNWVKQAPGKGFKWMGWINTNTGKPTYSDEFKGRFVFSLETSASTAYLLINNLSNEDTATYFCARSIYYYGSRYFNVWGAGTTVTVSSGGGGSGGGGSGGGGSDIQMTQSTSSLSASLGDRVTISCRASQDINNYLTWYQQKPDGTVKLLIYYTSRLHSGVPSRFSGSGSGTDYSLTITNLEQEDFATYFCQQGNTLPWTFGEGTKVEIKSGGGGSEVQLVESGGGLVQPGGSLKLSCAASGFTFNKYAMNWVRQAPGKGLEWVARIRSKYNNYATYYADSVKDRFTISRDDSKNTAYLQMNNLKTEDTAVYYCVRHGNFGNSYISYWAYWGQGTLVTVSSGGGGSGGGGSGGGGSQTVVTQEPSLTVSPGGTVTLTCGSSTGAVTSGNYPNWVQQKPGQAPRGLIGGTKFLAPGTPARFSGSLLGGKAALTLSGVQPEDEAEYYCVLWYSNRWVFGGGTKLTVL

SEQ ID NO: 2196 - DNA, 1494 bp, Artificial Sequence
  IGF1R21HLxI2CHL
cagatccagcttgtccagagtggtcccgagctgaagaaacctggcgaaaccgtgaaaatcagctgcaaggcaagcggctatacactggccaactatggcatgaattgggtgaagcaggcacctgggaagggtttcaagtggatgggctggatcaacaccaacactggcaaaccaacctattccgacgagttcaaggggcgtttcgtgttttcactggaaacctccgcatcaaccgcttacctcttgatcaacaacctgagcaacgaggacaccgccacatacttctgcgctaggagcatctactactatgggagccgctacttcaatgtgtggggagctgggacaactgttactgtgagctcaggagggggaggtagcggaggaggcggtagcggaggcggtggatccgatatccagatgacacagagcacaagttcattgtccgcctctcttggcgatcgagtgaccattagctgccgagcaagccaggacattaacaactacctgacctggtatcagcagaaacccgacgggactgtgaagctgctgatctattacacctctagactgcacagtggcgttcctagccggtttagcggatccggtagcggaacagattactccctgaccatcaccaatctcgagcaggaagactttgccacctacttttgccagcagggcaatactctcccatggacatttggtgaggggaccaaagtcgagattaagtccggaggtggtggatccgaggtgcagctggtcgagtctggaggaggattggtgcagcctggagggtcattgaaactctcatgtgcagcctctggattcaccttcaataagtacgccatgaactgggtccgccaggctccaggaaagggtttggaatgggttgctcgcataagaagtaaatataataattatgcaacatattatgccgattcagtgaaagacaggttcaccatctccagagatgattcaaaaaacactgcctatctacaaatgaacaacttgaagactgaggacactgccgtgtactactgtgtgagacatgggaacttcggtaatagctacatatcctactgggcttactggggccaagggactctggtcaccgtctcctcaggtggtggtggttctggcggcggcggctccggtggtggtggttctcagactgttgtgactcaggaaccttcactcaccgtatcacctggtggaacagtcacactcacttgtggctcctcgactggggctgttacatctggcaactacccaaactgggtccaacaaaaaccaggtcaggcaccccgtggtctaataggtgggactaagttcctcgcccccggtactcctgccagattctcaggctccctgcttggaggcaaggctgccctcaccctctcaggggtacagccagaggatgaggcagaatattactgtgttctatggtacagcaaccgctgggtgttcggtggaggaaccaaactgactgtccta

SEQ ID NO: 2197 - protein, 115 aa, Artificial Sequence
  IGF1R23-H
EVQLVESGGGLVQPGGSLRLSCAASGYTFTRFWIHWVRQAPGKGLEWVGEINPSNGRTNYNENFKNRFTISADTSKNTAYLQMNSLRAEDTAVYYCARGGRLDQWGQGTLVTVSS

SEQ ID NO: 2198 - protein, 5 aa, Artificial Sequence
  IGF1R23-HCDR1
RFWIH

SEQ ID NO: 2199 - protein, 17 aa, Artificial Sequence
  IGF1R23-HCDR2
EINPSNGRTNYNENFKN

SEQ ID NO: 2200 - protein, 6 aa, Artificial Sequence
  IGF1R23-HCDR3
GGRLDQ

SEQ ID NO: 2201 - DNA, 345 bp, Artificial Sequence
  IGF1R23-H
gaagtccagcttgttgaaagcggaggcggtctggttcagcctggtggatctctgagactgagctgcgctgcaagcggctacacattcacacgcttttggattcattgggtgaggcaggcccctggaaaaggactcgaatgggtgggcgagatcaatcctagcaacggtcggaccaactacaacgagaacttcaagaaccggttcaccatctctgccgacacctccaagaataccgcatacctgcagatgaatagcctccgagccgaggacactgccgtctattactgtgctaggggaggacgccttgatcagtggggacaggggacacttgtgactgtgtcatcc

SEQ ID NO: 2202 - protein, 107 aa, Artificial Sequence
  IGF1R23-L
DIQMTQSPSSLSASVGDRVTITCKASQNLRSKVAWYQQKPGKAPKLLIYSASYRYSGVPSRFSGSGSGTDFTLTISSLQPEDFATYYCQQYSNYPYTFGQGTKVEIK

SEQ ID NO: 2203 - protein, 11 aa, Artificial Sequence
  IGF1R23-LCDR1
KASQNLRSKVA

SEQ ID NO: 2204 - protein, 7 aa, Artificial Sequence
  IGF1R23-LCDR2
SASYRYS

SEQ ID NO: 2205 - protein, 9 aa, Artificial Sequence
  IGF1R23-LCDR3
QQYSNYPYT

SEQ ID NO: 2206 - DNA, 321 bp, Artificial Sequence
  IGF1R23-L
gatattcagatgacccagagcccaagctccttgagcgctagcgttggcgatcgtgtgactatcacctgtaaggctagccagaacctgcgaagcaaggtcgcatggtatcagcagaaacccggcaaagccccaaagctgctgatctactccgcatcctatcggtattccggcgtgccaagcagattcagtgggagtgggagcggaactgactttaccctcaccatctcatccctgcagcctgaggactttgccacctactattgccagcagtattccaactacccctacacctttggccagggcacaaaagtggagatcaag

SEQ ID NO: 2207 - protein, 237 aa, Artificial Sequence
  IGF1R23-HL
EVQLVESGGGLVQPGGSLRLSCAASGYTFTRFWIHWVRQAPGKGLEWVGEINPSNGRTNYNENFKNRFTISADTSKNTAYLQMNSLRAEDTAVYYCARGGRLDQWGQGTLVTVSSGGGGSGGGGSGGGGSDIQMTQSPSSLSASVGDRVTITCKASQNLRSKVAWYQQKPGKAPKLLIYSASYRYSGVPSRFSGSGSGTDFTLTISSLQPEDFATYYCQQYSNYPYTFGQGTKVEIK

SEQ ID NO: 2208 - DNA, 711 bp, Artificial Sequence
  IGF1R23-HL
gaagtccagcttgttgaaagcggaggcggtctggttcagcctggtggatctctgagactgagctgcgctgcaagcggctacacattcacacgcttttggattcattgggtgaggcaggcccctggaaaaggactcgaatgggtgggcgagatcaatcctagcaacggtcggaccaactacaacgagaacttcaagaaccggttcaccatctctgccgacacctccaagaataccgcatacctgcagatgaatagcctccgagccgaggacactgccgtctattactgtgctaggggaggacgccttgatcagtggggacaggggacacttgtgactgtgtcatccggtgggggaggtagtgggggaggtggaagcggcggaggaggcagcgatattcagatgacccagagcccaagctccttgagcgctagcgttggcgatcgtgtgactatcacctgtaaggctagccagaacctgcgaagcaaggtcgcatggtatcagcagaaacccggcaaagccccaaagctgctgatctactccgcatcctatcggtattccggcgtgccaagcagattcagtgggagtgggagcggaactgactttaccctcaccatctcatccctgcagcctgaggactttgccacctactattgccagcagtattccaactacccctacacctttggccagggcacaaaagtggagatcaag

SEQ ID NO: 2209 - protein, 492 aa, Artificial Sequence
  IGF1R23HLxI2CHL
EVQLVESGGGLVQPGGSLRLSCAASGYTFTRFWIHWVRQAPGKGLEWVGEINPSNGRTNYNENFKNRFTISADTSKNTAYLQMNSLRAEDTAVYYCARGGRLDQWGQGTLVTVSSGGGGSGGGGSGGGGSDIQMTQSPSSLSASVGDRVTITCKASQNLRSKVAWYQQKPGKAPKLLIYSASYRYSGVPSRFSGSGSGTDFTLTISSLQPEDFATYYCQQYSNYPYTFGQGTKVEIKSGGGGSEVQLVESGGGLVQPGGSLKLSCAASGFTFNKYAMNWVRQAPGKGLEWVARIRSKYNNYATYYADSVKDRFTISRDDSKNTAYLQMNNLKTEDTAVYYCVRHGNFGNSYISYWAYWGQGTLVTVSSGGGGSGGGGSGGGGSQTVVTQEPSLTVSPGGTVTLTCGSSTGAVTSGNYPNWVQQKPGQAPRGLIGGTKFLAPGTPARFSGSLLGGKAALTLSGVQPEDEAEYYCVLWYSNRWVFGGGTKLTVL

SEQ ID NO: 2210 - DNA, 1476 bp, Artificial Sequence
  IGF1R23HLxI2CHL
gaagtccagcttgttgaaagcggaggcggtctggttcagcctggtggatctctgagactgagctgcgctgcaagcggctacacattcacacgcttttggattcattgggtgaggcaggcccctggaaaaggactcgaatgggtgggcgagatcaatcctagcaacggtcggaccaactacaacgagaacttcaagaaccggttcaccatctctgccgacacctccaagaataccgcatacctgcagatgaatagcctccgagccgaggacactgccgtctattactgtgctaggggaggacgccttgatcagtggggacaggggacacttgtgactgtgtcatccggtgggggaggtagtgggggaggtggaagcggcggaggaggcagcgatattcagatgacccagagcccaagctccttgagcgctagcgttggcgatcgtgtgactatcacctgtaaggctagccagaacctgcgaagcaaggtcgcatggtatcagcagaaacccggcaaagccccaaagctgctgatctactccgcatcctatcggtattccggcgtgccaagcagattcagtgggagtgggagcggaactgactttaccctcaccatctcatccctgcagcctgaggactttgccacctactattgccagcagtattccaactacccctacacctttggccagggcacaaaagtggagatcaagtccggaggtggtggatccgaggtgcagctggtcgagtctggaggaggattggtgcagcctggagggtcattgaaactctcatgtgcagcctctggattcaccttcaataagtacgccatgaactgggtccgccaggctccaggaaagggtttggaatgggttgctcgcataagaagtaaatataataattatgcaacatattatgccgattcagtgaaagacaggttcaccatctccagagatgattcaaaaaacactgcctatctacaaatgaacaacttgaagactgaggacactgccgtgtactactgtgtgagacatgggaacttcggtaatagctacatatcctactgggcttactggggccaagggactctggtcaccgtctcctcaggtggtggtggttctggcggcggcggctccggtggtggtggttctcagactgttgtgactcaggaaccttcactcaccgtatcacctggtggaacagtcacactcacttgtggctcctcgactggggctgttacatctggcaactacccaaactgggtccaacaaaaaccaggtcaggcaccccgtggtctaataggtgggactaagttcctcgcccccggtactcctgccagattctcaggctccctgcttggaggcaaggctgccctcaccctctcaggggtacagccagaggatgaggcagaatattactgtgttctatggtacagcaaccgctgggtgttcggtggaggaaccaaactgactgtccta

SEQ ID NO: 2211 - protein, 120 aa, Artificial Sequence
  IGF1R24-H
EVQLVESGGELVQPGGSLRLSCAASGFTFSSYAMSWVRQAPGKGLEWVSRISPSGGSTYYADSVKGRFTISADTSKNTAYLQMNSLRAEDTAVYYCAREEYYYWGAMDVWGQGTLVTVSS

SEQ ID NO: 2212 - protein, 5 aa, Artificial Sequence
  IGF1R24-HCDR1
SYAMS

SEQ ID NO: 2213 - protein, 17 aa, Artificial Sequence
  IGF1R24-HCDR2
RISPSGGSTYYADSVKG

SEQ ID NO: 2214 - protein, 11 aa, Artificial Sequence
  IGF1R24-HCDR3
EEYYYWGAMDV

SEQ ID NO: 2215 - DNA, 360 bp, Artificial Sequence
  IGF1R24-H
gaagttcagctggtggaatccgggggagagcttgttcagcctggcggatcacttaggctgtcctgtgctgcaagcggcttcaccttctctagctatgccatgtcatgggtgcgacaggcccctggaaaaggactggagtgggtctcacgtatctctccaagtggcggatccacatactacgccgatagcgtgaaagggaggtttaccatttccgctgacacctccaagaacaccgcctacctgcagatgaactcactgagagccgaagacactgccgtgtactattgcgcacgggaggagtactactattggggagctatggacgtgtggggacagggaacattggtgactgtgtcttcc

SEQ ID NO: 2216 - protein, 107 aa, Artificial Sequence
  IGF1R24-L
DIQMTQSPSSLSASVGDRVTITCRASQSISSYLAWYQQKPGKAPKLLIYGASSRASGVPSRFSGSGSGTDFTLTISSLQPEDFATYYCQQYYSSPLTFGQGTKVEIK

SEQ ID NO: 2217 - protein, 11 aa, Artificial Sequence
  IGF1R24-LCDR1
RASQSISSYLA

SEQ ID NO: 2218 - protein, 7 aa, Artificial Sequence
  IGF1R24-LCDR2
GASSRAS

SEQ ID NO: 2219 - protein, 9 aa, Artificial Sequence
  IGF1R24-LCDR3
QQYYSSPLT

SEQ ID NO: 2220 - DNA, 321 bp, Artificial Sequence
  IGF1R24-L
gatatccagatgacacagagcccaagctcactgagcgctagcgtcggagatagagtcaccatcacctgtagggcaagccagagcatctctagctacctggcatggtaccagcagaaacctggcaaggctcccaagctcctgatctacggcgcttcatctagagctagcggcgttccctcacgatttagcggaagcggaagcggaactgacttcaccctgaccatttcaagcctccagcctgaggatttcgccacctactactgccagcagtactactctagcccactcacatttgggcaggggacaaaggtggagatcaag

SEQ ID NO: 2221 - protein, 242 aa, Artificial Sequence
  IGF1R24-HL
EVQLVESGGELVQPGGSLRLSCAASGFTFSSYAMSWVRQAPGKGLEWVSRISPSGGSTYYADSVKGRFTISADTSKNTAYLQMNSLRAEDTAVYYCAREEYYYWGAMDVWGQGTLVTVSSGGGGSGGGGSGGGGSDIQMTQSPSSLSASVGDRVTITCRASQSISSYLAWYQQKPGKAPKLLIYGASSRASGVPSRFSGSGSGTDFTLTISSLQPEDFATYYCQQYYSSPLTFGQGTKVEIK

SEQ ID NO: 2222 - DNA, 726 bp, Artificial Sequence
  IGF1R24-HL
gaagttcagctggtggaatccgggggagagcttgttcagcctggcggatcacttaggctgtcctgtgctgcaagcggcttcaccttctctagctatgccatgtcatgggtgcgacaggcccctggaaaaggactggagtgggtctcacgtatctctccaagtggcggatccacatactacgccgatagcgtgaaagggaggtttaccatttccgctgacacctccaagaacaccgcctacctgcagatgaactcactgagagccgaagacactgccgtgtactattgcgcacgggaggagtactactattggggagctatggacgtgtggggacagggaacattggtgactgtgtcttccggtggcggaggaagcggaggtggcggaagcggaggcggtggaagcgatatccagatgacacagagcccaagctcactgagcgctagcgtcggagatagagtcaccatcacctgtagggcaagccagagcatctctagctacctggcatggtaccagcagaaacctggcaaggctcccaagctcctgatctacggcgcttcatctagagctagcggcgttccctcacgatttagcggaagcggaagcggaactgacttcaccctgaccatttcaagcctccagcctgaggatttcgccacctactactgccagcagtactactctagcccactcacatttgggcaggggacaaaggtggagatcaag

SEQ ID NO: 2223 - protein, 497 aa, Artificial Sequence
  IGF1R24HLxI2CHL
EVQLVESGGELVQPGGSLRLSCAASGFTFSSYAMSWVRQAPGKGLEWVSRISPSGGSTYYADSVKGRFTISADTSKNTAYLQMNSLRAEDTAVYYCAREEYYYWGAMDVWGQGTLVTVSSGGGGSGGGGSGGGGSDIQMTQSPSSLSASVGDRVTITCRASQSISSYLAWYQQKPGKAPKLLIYGASSRASGVPSRFSGSGSGTDFTLTISSLQPEDFATYYCQQYYSSPLTFGQGTKVEIKSGGGGSEVQLVESGGGLVQPGGSLKLSCAASGFTFNKYAMNWVRQAPGKGLEWVARIRSKYNNYATYYADSVKDRFTISRDDSKNTAYLQMNNLKTEDTAVYYCVRHGNFGNSYISYWAYWGQGTLVTVSSGGGGSGGGGSGGGGSQTVVTQEPSLTVSPGGTVTLTCGSSTGAVTSGNYPNWVQQKPGQAPRGLIGGTKFLAPGTPARFSGSLLGGKAALTLSGVQPEDEAEYYCVLWYSNRWVFGGGTKLTVL

SEQ ID NO: 2224 - DNA, 1491 bp, Artificial Sequence
  IGF1R24HLxI2CHL
gaagttcagctggtggaatccgggggagagcttgttcagcctggcggatcacttaggctgtcctgtgctgcaagcggcttcaccttctctagctatgccatgtcatgggtgcgacaggcccctggaaaaggactggagtgggtctcacgtatctctccaagtggcggatccacatactacgccgatagcgtgaaagggaggtttaccatttccgctgacacctccaagaacaccgcctacctgcagatgaactcactgagagccgaagacactgccgtgtactattgcgcacgggaggagtactactattggggagctatggacgtgtggggacagggaacattggtgactgtgtcttccggtggcggaggaagcggaggtggcggaagcggaggcggtggaagcgatatccagatgacacagagcccaagctcactgagcgctagcgtcggagatagagtcaccatcacctgtagggcaagccagagcatctctagctacctggcatggtaccagcagaaacctggcaaggctcccaagctcctgatctacggcgcttcatctagagctagcggcgttccctcacgatttagcggaagcggaagcggaactgacttcaccctgaccatttcaagcctccagcctgaggatttcgccacctactactgccagcagtactactctagcccactcacatttgggcaggggacaaaggtggagatcaagtccggaggtggtggatccgaggtgcagctggtcgagtctggaggaggattggtgcagcctggagggtcattgaaactctcatgtgcagcctctggattcaccttcaataagtacgccatgaactgggtccgccaggctccaggaaagggtttggaatgggttgctcgcataagaagtaaatataataattatgcaacatattatgccgattcagtgaaagacaggttcaccatctccagagatgattcaaaaaacactgcctatctacaaatgaacaacttgaagactgaggacactgccgtgtactactgtgtgagacatgggaacttcggtaatagctacatatcctactgggcttactggggccaagggactctggtcaccgtctcctcaggtggtggtggttctggcggcggcggctccggtggtggtggttctcagactgttgtgactcaggaaccttcactcaccgtatcacctggtggaacagtcacactcacttgtggctcctcgactggggctgttacatctggcaactacccaaactgggtccaacaaaaaccaggtcaggcaccccgtggtctaataggtgggactaagttcctcgcccccggtactcctgccagattctcaggctccctgcttggaggcaaggctgccctcaccctctcaggggtacagccagaggatgaggcagaatattactgtgttctatggtacagcaaccgctgggtgttcggtggaggaaccaaactgactgtccta

SEQ ID NO: 2225 - protein, 27 aa, Macaca fascicularis
  MISC_FEATURE: Macaca fascicularis CD3 epsilon FN18+ 1-27
QDGNEEMGSITQTPYQVSISGTTILTC

SEQ ID NO: 2226 - protein, 27 aa, Macaca fascicularis
  MISC_FEATURE: Macaca fascicularis CD3 epsilon FN18- 1-27
QDGNEEMGSITQTPYQVSISGTTVILT

SEQ ID NO: 2227 - protein, 27 aa, Macaca mulatta
  MISC_FEATURE: Macaca mulatta CD3 epsilon 1-27
QDGNEEMGSITQTPYHVSISGTTVILT

SEQ ID NO: 2228 - protein, 5 aa, Artificial Sequence
  Spacer
GGGGS

SEQ ID NO: 2229 - protein, 5 aa, Artificial Sequence
  Synthetic peptide
QDGNE

SEQ ID NO: 2230 - DNA, 288 bp, Callithrix jacchus
caggacggtaatgaagaaatgggtgatactacacagaacccatataaagtttccatctcaggaaccacagtaacactgacatgccctcggtatgatggacatgaaataaaatggctcgtaaatagtcaaaacaaagaaggtcatgaggaccacctgttactggaggacttttcggaaatggagcaaagtggttattatgcctgcctctccaaagagactcccgcagaagaggcgagccattatctctacctgaaggcaagagtgtgtgagaactgcgtggaggtggat

SEQ ID NO: 2231 - DNA, 288 bp, Saguinus oedipus
caggacggtaatgaagaaatgggtgatactacacagaacccatataaagtttccatctcaggaaccacagtaacactgacatgccctcggtatgatggacatgaaataaaatggcttgtaaatagtcaaaacaaagaaggtcatgaggaccacctgttactggaggatttttcggaaatggagcaaagtggttattatgcctgcctctccaaagagactcccgcagaagaggcgagccattatctctacctgaaggcaagagtgtgtgagaactgcgtggaggtggat

SEQ ID NO: 2232 - DNA, 288 bp, Saguinus oedipus
caggacggtaatgaagagattggtgatactacccagaacccatataaagtttccatctcaggaaccacagtaacactgacatgccctcggtatgatggacaggaaataaaatggctcgtaaatgatcaaaacaaagaaggtcatgaggaccacctgttactggaagatttttcagaaatggaacaaagtggttattatgcctgcctctccaaagagacccccacagaagaggcgagccattatctctacctgaaggcaagagtgtgtgagaactgcgtggaggtggat

SEQ ID NO: 2233 - protein, 10 aa, Artificial Sequence
  Flag-tag
TGDYKDDDDK

SEQ ID NO: 2234 - protein, 9 aa, Artificial Sequence
  Linker
SRTRSGSQL

SEQ ID NO: 2235 - protein, 4 aa, Artificial Sequence
  Linker
SGSG
